(19) United States
(12) Patent Application Publication
(10) Pub. No.: US 2023/0124977 A1
(43) Pub. Date: Apr. 20, 2023

(54) CROSS-REACTIVE ANTIBODIES AND USES THEREOF

(71) Applicant: VANDERBILT UNIVERSITY, Nashville, TN (US)

(72) Inventors: Ivelin Stefanov Georgiev, Nashville, TN (US); Kelsey A. Pilewski, Nashville, TN (US)

(21) Appl. No.: 17/820,418

(22) Filed: Aug. 17, 2022

Related U.S. Application Data
(60) Provisional application No. 63/233,906, filed on Aug. 17, 2021.

(51) Int. Cl. C07K 16/10; C07K 16/12; A61P 31/04; A61P 31/14; A61P 31/18

(52) U.S. Cl. CPC C07K 16/109; C07K 16/10; C07K 16/1018; C07K 16/1045; C07K 16/1232; A61P 31/04; A61P 31/14; A61P 31/18; C07K 2317/31

(57) ABSTRACT

The present disclosure relates to broadly neutralizing antibodies and uses thereof for treating a pathogen infection or a co-infection of multiple pathogens.

### CROSS REFERENCE TO RELATED APPLICATIONS

[0001] This application claims the benefit of U.S. Provisional Patent Application Ser. No. 63/233,906 filed Aug. 17, 2021, the disclosure of which is expressly incorporated herein by reference in its entirety.

### STATEMENT REGARDING FEDERALLY SPONSORED RESEARCH

[0002] This invention was made with government support under Grant No. R01 AI131722 and R01 AI152693 awarded by the National Institutes of Health. The government has certain rights in the invention.

### REFERENCE TO A SEQUENCE LISTING

[0003] The Sequence Listing submitted Aug. 17, 2022 as an XML file named “10644-134US1_Sequence_Listing.xml,” created on Aug. 15, 2022, and having a size of 17,299,382 bytes is hereby incorporated by reference pursuant to 37 C.F.R. § 1.834.

### FIELD

[0004] The present disclosure relates to antibodies and uses thereof for treating infection.

### BACKGROUND

[0005] SARS-CoV-2, or the 2019 novel coronavirus (COVID-19), is a significant pandemic threat that has resulted in over 203,295,000 diagnosed cases including 4,303,515 deaths as of Aug. 10, 2021. The development of preventive and therapeutic measures that can counteract the ongoing, and any future, coronavirus pandemics is therefore of utmost significance for public health worldwide. Cross-reactivity between antigens occurs when an antibody directed against one specific antigen is successful in binding with another, different antigen. What is needed are novel cross-reactive antibodies and methods for treating SARS-CoV-2 infection or co-infection of SARS-CoV-2 and other pathogens.

### SUMMARY

[0006] In some aspects, disclosed herein is a method of treating a coronavirus infection in a subject in need comprising administering to the subject a therapeutically effective amount of a recombinant antibody, wherein the recombinant antibody comprises a light chain variable region (VL) that comprises a light chain complementarity determining region (CDRL)3 and a heavy chain variable region (VH) that comprises a heavy chain complementarity determining region (CDRH)3, wherein the CDRL3 comprises an amino acid sequence at least 60% identical to CQQSYNVPTF (SEQ ID NO: 1884), and wherein the CDRH3 comprises an amino acid sequence at least 60% identical to CAKGLTTESRLEFW (SEQ ID NO: 1818). In some embodiments, the CDRL3 comprises an amino acid sequence at least 95% identical to CQQSYNVPTF (SEQ ID NO: 1884). In some embodiments, the CDRH3 comprises an amino acid sequence at least 95% identical to CAKGLTTESRLEFW (SEQ ID NO: 1818). In some embodiments, the coronavirus comprises MERS-CoV, SARS-CoV, or SARS-CoV-2. In some embodiments, the subject is co-infected by a pathogen. In some embodiments, the virus is selected from the group consisting of influenza A, influenza B, HIV, and HCV. In some embodiments, the bacterium is Escherichia coli.

[0007] In some aspects, disclosed herein is a method of treating an influenza infection in a subject in need comprising administering to the subject a therapeutically effective amount of a recombinant antibody, wherein the recombinant antibody comprises a light chain variable region (VL) that comprises a light chain complementarity determining region (CDRL)3 and a heavy chain variable region (VH) that comprises a heavy chain complementarity determining region (CDRH)3, wherein the CDRL3 comprises an amino acid sequence at least 60% identical to CQQSYNVPTF (SEQ ID NO: 1884), and wherein the CDRH3 comprises an amino acid sequence at least 60% identical to CAKGLTTESRLEFW (SEQ ID NO: 1818). In some embodiments, the influenza is influenza A or influenza B. In some embodiments, the subject is co-infected by a pathogen. In some embodiments, the pathogen is a virus or a bacterium. In some embodiments, the virus is selected from the group consisting of MERS-CoV, SARS-CoV, SARS-CoV-2, HIV, and HCV. In some embodiments, the bacterium is Escherichia coli.

[0008] In some aspects, disclosed herein is a method of treating an Escherichia coli infection in a subject in need comprising administering to the subject a therapeutically effective amount of a recombinant antibody, wherein the recombinant antibody comprises a light chain variable region (VL) that comprises a light chain complementarity determining region (CDRL)3 and a heavy chain variable region (VH) that comprises a heavy chain complementarity determining region (CDRH)3, wherein the CDRL3 comprises an amino acid sequence at least 60% identical to CQQSYNVPTF (SEQ ID NO: 1884), and wherein the CDRH3 comprises an amino acid sequence at least 60% identical to CAKGLTTESRLEFW (SEQ ID NO: 1818). In some embodiments, the subject is co-infected by a pathogen. In some embodiments, the pathogen is a virus or a bacterium. In some embodiments, the virus is selected from the group consisting of MERS-CoV, SARS-CoV, SARS-CoV-2, influenza A, influenza B, HIV, and HCV.

[0009] In some aspects, disclosed herein is a method of treating a coronavirus infection in a subject in need comprising administering to the subject a therapeutically effective amount of a recombinant antibody, wherein the recombinant antibody comprises a light chain variable region (VL) that comprises a light chain complementarity determining region (CDRL)1, a CDRL2, and a CDRL3 and a heavy chain variable region (VH) that comprises a heavy chain complementarity determining region (CDRH)1, CDRH2, CDRH3, wherein
[0010] CDRL1 is SEQ ID NO: 13121,
[0011] CDRL2 is SEQ ID NO: 13127,
[0012] CDRL3 is SEQ ID NO: 25 or 1884,
[0013] CDRH1 is SEQ ID NO: 13103,
[0014] CDRH2 is SEQ ID NO: 13109, and
[0015] CDRH3 is SEQ ID NO: 1818.

[0016] In some aspects, disclosed herein is a method of treating an influenza infection in a subject in need comprising administering to the subject a therapeutically effective amount of a recombinant antibody, wherein the recombinant antibody comprises a light chain variable region (VL) that comprises a light chain complementarity determining region (CDRL)1, a CDRL2, and a CDRL3 and a heavy chain variable region (VH) that comprises a heavy chain complementarity determining region (CDRH)1, CDRH2, CDRH3, wherein
[0017] CDRL1 is SEQ ID NO: 13121,
[0018] CDRL2 is SEQ ID NO: 13127,
[0019] CDRL3 is SEQ ID NO: 25 or 1884,
[0020] CDRH1 is SEQ ID NO: 13103,
[0021] CDRH2 is SEQ ID NO: 13109, and
[0022] CDRH3 is SEQ ID NO: 1818.

[0023] In some aspects, disclosed herein is a method of treating an Escherichia coli infection in a subject in need comprising administering to the subject a therapeutically effective amount of a recombinant antibody, wherein the recombinant antibody comprises a light chain variable region (VL) that comprises a light chain complementarity determining region (CDRL)1, a CDRL2, and a CDRL3 and a heavy chain variable region (VH) that comprises a heavy chain complementarity determining region (CDRH)1, CDRH2, CDRH3, wherein
[0024] CDRL1 is SEQ ID NO: 13121,
[0025] CDRL2 is SEQ ID NO: 13127,
[0026] CDRL3 is SEQ ID NO: 25 or 1884,
[0027] CDRH1 is SEQ ID NO: 13103,
[0028] CDRH2 is SEQ ID NO: 13109, and
[0029] CDRH3 is SEQ ID NO: 1818.

### BRIEF DESCRIPTION OF DRAWINGS

[0030] The accompanying figures, which are incorporated in and constitute a part of this specification, illustrate aspects described below.

[0031] FIGS. 1A-1G show discovery of Exceptionally Broad Anti-viral Antibodies from a Chronically HIV-1/HCV Co-infected Donor. FIG. 1A shows plot of maximum LIBRA-seq score for an HIV antigen (Ag) vs. HCV antigen where each dot represents a single class-switched (IgG, IgA) cell. Colored dots represent antibodies selected for further study. Cells with antigen values <0 were set to −4. FIG. 1B shows genetic features of identified HIV-1/HCV cross-reactive BCRs. Color of antibody name corresponds to LIBRA-seq score colors in A. FIG. 1C shows binding of HIV/HCV cross-reactive recombinant antibodies to the panel of viral antigens (shown on the left) at 10 ug/mL as measured by ELISA. The following antibodies are shown as controls: AR3C (HCV E2), VRC01 (HIV-1 gp120). FIGS. 1D-1E show recombinantly-expressed lead antibody binding to clade B (B41) and clade A (BG505) HIV envelope glycoproteins; and (FIGS. 1F-1G) genotype 2a (JFH1) and genotype 1a (H77) HCV envelope glycoproteins, measured by ELISA. The sequences in FIG. 1 include: CAKGLTTESRLEFW (SEQ ID NO: 1818), CVSSWGPESPYYFDYW (SEQ ID NO: 1819), CAREYCTGGDCHFFLDYW (SEQ ID NO: 1820), CARVAPPGVVNNKWFDIW (SEQ ID NO: 1821), CARSEKRVTMTRKIKGRWFGPW (SEQ ID NO: 1822), CQQSYNVPTF (SEQ ID NO: 1884), CHQSSSLPFTF (SEQ ID NO: 1885), CQHFYSSPPTF (SEQ ID NO: 1886), CCLYAGSYSWVF (SEQ ID NO: 1887), and CQVWDSSSEHVVF (SEQ ID NO: 1888).

[0032] FIGS. 2A-2F show that HIV-1/HCV cross-reactive antibodies recognize distinct epitopes on the HIV-1 and HCV Envelope Glycoproteins. (FIG. 2A) Antibody binding to the E1 (strain: HC-J4; left) and E2 (strain: JFH-1; right) subunits of the HCV envelope glycoprotein measured by ELISA. The HCV1 E2-specific antibody HCV1 is shown as a positive control, and the HIV-1-specific antibody VRC01 is shown as a negative control. (FIG. 2B) Antibody binding to HCV E2 glycoprotein (strain: JFH-1) in the presence of 1M D-(+)-Mannose. Data plotted as % inhibition as compared to binding in PBS buffer. Antibodies demonstrating negative % inhibition values were set to 0 (FIG. 2C) Antibody binding to cell surface-expressed HCV E1E2 (strain: H77) measured by flow cytometry. Cells were either pre-incubated with PBS (filled bar) or CD81-LEL (open bar) before detection by fluorescent secondary. Data shown as background-subtracted mean fluorescence intensity (MFI). (FIG. 2D) Antibody binding to the gp120 (strain AE.A244) (left) and gp41 (strain: MN) (right) subunits of the HIV-1 envelope glycoprotein measured by ELISA. The gp120-specific and gp41-specific antibodies VRC01 and 2F5, respectively, are shown as positive controls, and the HCV-specific antibody HCV1 is shown as a negative control. (FIG. 2E) Antibody binding to HIV-1 gp140 (strain: BG505) in the presence of 1M D-(+)-Mannose measured ELISA. Data plotted as % inhibition as compared to binding in PBS buffer. The mannose-independent HIV-1 antibody VRC01 is shown as a control. Antibodies demonstrating negative % inhibition values were set to 0. (FIG. 2F) Antibody binding to HIV-1 gp140 (strain: BG505) in the presence of competitor antibodies measured by ELISA. Competitor antibodies (shown on the Y axis) were added first, and subsequently binding of biotinylated analyte to antibodies (shown on the X axis) was detected. Data displayed as % inhibition, calculated as a function of no competition controls.

[0033] FIGS. 3A-3G show that HIV-1/HCV Cross-reactive antibodies show diverse neutralization and fc-mediated effector functions. FIG. 3A shows in vitro neutralization of a panel of diverse genotype 1 HCV virus strains by HIV-1/HCV-reactive antibodies and control antibody HEPC74 at 100 μg/mL. % Neutralization calculated in comparison to unrelated IgG control. FIG. 3B shows antibody-dependent cellular phagocytosis (ADCP) by either HIV-1/HCV cross-reactive or control antibodies (HCV1: positive; Palivizumab: negative) against HCV E1E2 envelope protein (H77). FIG. 3C shows area under the curve (AUC) values computed from (FIG. 3B). FIG. 3D shows antibody-dependent cellular cytotoxicity (ADCC) potentiated by either HIV-1/HCV cross-reactive or control antibodies (PGT151/HIVIG C: positive; Palivizumab: negative) against infectious HIV-1 envelope protein (CE1086). FIG. 3E shows area under the curve (AUC) values computed from (FIG. 3D). FIG. 3F shows antibody-dependent cellular phagocytosis (ADCP) by either HIV-1/HCV cross-reactive or control antibodies (CAP256.26.25/HIVIG C: positive; Palivizumab: negative) against HIV-1 envelope protein (BG505). FIG. 3G shows area under the curve (AUC) computed from (FIG. 3F).

[0034] FIGS. 4A-4E show that cross-reactive mab688 reveals exceptionally broad anti-viral functions achieved by glycan recognition. FIG. 4A shows binding of HIV-1/HCV cross-reactive antibodies (columns) to a panel of diverse viral antigens (rows) at 10 μg/mL, as measured by ELISA. The following antibodies are shown as controls: HCV1 (HCV E2), VRC01 (HIV-1 gp120), FE53 (HA), Palivizumab (RSV F), CR3022 (SARS-CoV/SARS-CoV-2 S), 1F8 (MERS S). FIG. 4B shows mAb688 binding to SARS-CoV-2 spike protein with PBS (left) and competition in presence of 1M D-(+)-Mannose (right), displayed as % inhibition (y-axis) in the presence of mannose. FIG. 4C shows mAb688 binding to Influenza A HA (strain H1N1/New Caledonia/1999) envelope glycoprotein with PBS (left) and competition in presence of 1M D-(+)-Mannose (right), displayed as % inhibition (y-axis) in the presence of mannose. FIG. 4D shows antibody-dependent cellular phagocytosis (ADCP) of SARS-CoV-2 envelope glycoprotein (left), with data displayed as area under the curve (AUC, right). CR3022 is shown as a positive control, and Palivizumab is shown as a negative control. FIG. 4E shows antibody-dependent cellular phagocytosis (ADCP) of Influenza A HA (strain H1N1/New Caledonia/1999) envelope glycoprotein (left), with data displayed as AUC (right). CR9114 is shown as a positive control, and Palivizumab is shown as a negative control.

[0035] FIGS. 5A-5D show that somatic hypermutation establishes and enhances cross-reactivity. Binding of germline-reverted antibody mutants (FIG. 5A) mAb180 and (FIG. 5B) mAb692 to HIV-1 gp140 (strain: BG505, gray bars) and HCV E2 (strain: JFH1, black bars) measured by ELISA. Data shown was calculated by dividing the area under the ELISA curve (AUC) of the germline-reverted antibody by the AUC of the native antibody (% Native binding). Binding of early sequences clonally related to (FIG. 5C) mAb180 or (FIG. 5D) mAb692 to HIV-1 gp140 (strain: BG505, left) or HCV E2 (strain: JFH1, right) measured by ELISA. Data is shown as a heatmap where % Native binding is calculated as in (FIGS. 5A-5B). Each heatmap square represents a unique combination of heavy and light chain sequences. The phylogenetic relationship between each set of sequences was determined using PhyML, not shown to scale.

[0036] FIGS. 6A-6C show strategy for the Identification of HIV-1/HCV cross-reactive B cells using LIBRA-seq. FIG. 6A shows diverse, DNA-barcoded envelope proteins from the indicated strains of both HIV-1 and HCV were used to isolate antigen-specific B cells from Vanderbilt HIV-1 cohort donor VC10014. FIG. 6B shows flow sorting strategy for the identification of antigen-specific B cells. First, the lymphocyte population was identified by scatter, followed by exclusion of dead cells, monocytes, and IgM-expressing cells. Next, the B cell population was identified, and Dead⁻, CD14⁻, IgM⁻, CD3⁻, CD19⁺, Antigen⁺ cells were sorted for subsequent single-cell sequencing. FIG. 6C shows frequency of B cells (y-axis) that were positive for each combination (filled circles connected by lines) of antigens (rows), colored by isotype. B cells with calculated LIBRA-seq scores >1 for a given antigen were considered positive.

[0037] FIGS. 7A-7G show characteristics of HCV and HIV-1 Envelope Recognition by HIV-1/HCV Antibodies. FIG. 7A shows antibody binding to PNGaseF de-glycosylated HCV E2 (strain: JFH1) measured by ELISA was compared to wild type (WT) binding. HCV-specific antibody AR3C is shown as a control. FIG. 7B shows antibody binding to HCV E2 (strain:JFH1) after mannosidase inhibitor treatment. AP33 is shown as a control. FIG. 7C shows nsEM images of HIV-1 gp140 in complex with either mAb180 (left: Fab, colored yellow) or mAb692 (right: Fab, colored yellow). FIG. 7D shows HIV-specific antibody binding to HCV envelope protein measured by ELISA. HCV-specific antibody AR3C is shown as a control. FIG. 7E shows antibody binding to PNGaseF de-glycosylated HIV-1 gp140 (strain: BG505) measured by ELISA was compared to wild type (WT) binding. HIV-specific antibody VRC01 is shown as a control. FIG. 7F shows antibody binding to HIV-1 Env (BG505) after mannosidase inhibitor treatment. FIG. 7G 7VRC01 is shown as a control.

[0038] FIGS. 8A-8C show HIV-1 and HCV Antibody Neutralization Phenotypes. FIG. 8A shows neutralization of HCV-pseudotyped viruses by HIV-1/HCV cross-reactive antibodies and human IgG control. For each antibody (panel) and concentration (x-axis) against each virus (colored curve), shown is % neutralization (y-axis) calculated as a function of no-antibody control. FIG. 8B shows half-maximal inhibitory concentration (IC50, μg/mL) of each antibody against the respective genotype 1 HCV virus strains from (FIG. 8A). ND=Not determined. FIG. 8C shows neutralization (IC50, μg/mL) of a panel of HIV-1-pseudotyped viruses by HIV-1/HCV cross-reactive antibodies.

[0039] FIGS. 9A-9G show mAb688 Functional Assays Against SARS-CoV-2, Influenza, and Escherichia coli. FIG. 9A shows mAb688 binding to WT or specific glycan-mutated SARS-CoV-2 S. FIG. 8B shows antibody-mediated neutralization of SARS-CoV-2-pseudotyped VSV particles. Antibody CoV2-2381 is shown as a positive control. FIG. 9C shows antibody inhibition of hemagglutination mediated by Influenza A HA (left: A/Brisbane/02/2018 (CA/09 pdm-like H1N1), right: A/Hong Kong/4801/2014 (H3N2)). Stem-specific antibodies CR6261 and CR8020 are shown as negative controls. Head-specific antibodies 1F8 and #585 are shown as positive controls. FIGS. 8D-8E show antibody-mediated neutralization of (FIG. 9D) Influenza A (IAV; A/California/07/2009 (pdm H1N1) or (FIG. 9E) Influenza B (IBV; B/Massachusetts/02/2012). Antibodies #7665, #1664, and #46 are shown as positive controls. FIG. 9F shows bacterial cell adherence to bladder epithelial cells was measured for both the WT UPEC strain UTI89 and bacteria lacking FimA-H, in the presence of either media, mannose or antibody. Bacterial adherence in the presence of 20 μg/mL mAb688 or the isotype control HCV1 is shown. Statistical significance determined by t-test. *** denotes p<0.001;**** denotes p<0.0001. FIG. 9G shows measurement of E. coli strain UTI89-mediated hemagglutination in the presence of either media, mannose or antibody. Hemagglutination in the presence of 20 μg/mL mAb688 or the isotype control HCV1 is shown. Statistical significance determined by one-way ANOVA with Dunnett's test for multiple comparisons. **** denotes p<0.0001.

[0040] FIG. 10 shows that mAb688 achieves broad anti-viral binding via recognition of immature glycans. Binding of mAb688 to a printed glycan microarray was tested at 50 μg/mL. Antibody binding was detected using fluorescent secondary antibody and data is shown as the average Relative Fluorescence Units (RFU). Glycan structures corresponding to numbered green circles are shown below.

[0041] FIGS. 11A-11C show autoreactivity of HIV-1/HCV cross-reactive antibodies. FIG. 11A shows antibody binding to a panel of autoantigens using the AtheNA multiplex assay, over a concentration gradient. Relative units (RU)>100 are considered positive. The HIV-1 antibody 4E10 is shown as a positive control, and mAb82 is shown as a negative control. FIGS. 11B-11C show antibody binding to whole, unpermeabilized, un-infected HEp-2 cells detected by anti-IgG-PE (anti-IgA-PE; mAb803, mAbKP1-8). FIG. 11B shows secondary only (negative) and 4E10 (positive) control plots. FIG. 11C shows binding of HIV/HCV cross-reactive antibodies depicted as MFI of the PE channel (-MFI unstained control) at the shown concentration of antibody.

[0042] FIGS. 12A-12C shows that native antibody features are crucial to binding viral envelopes. Binding of germline-reverted (FIG. 12A) mAb688 and/or isotype antibody mutants (FIG. 12B) mAb803, and (FIG. 12C) mAbKP1-8 to HIV-1 gp140 (strain: BG505, left) and HCV E1E2 (strain: H77, right) by ELISA.

[0043] FIGS. 13A-13B show cross-reactive antibody binding phenotypes in varying buffer conditions. Binding to either HCV (FIG. 13A) or HIV-1 (FIG. 13B) envelope glycoproteins by ELISA in the presence of the buffer conditions shown. Antigens were diluted in PBS, pH=7.4 and captured on ELISA plates coated with 500 ng/well GNA (Snowdrop) lectin, and buffer conditions shown were used for blocking, primary, and secondary antibody dilution steps, all buffers were prepared in PBS-T (PBS+0.05% Tween-20). Data shown was normalized to binding in the presence of PBS-T, pH=7.4 (WT binding).

### DETAILED DESCRIPTION

[0044] Reference will now be made in detail to the embodiments of the invention, examples of which are illustrated in the drawings and the examples. This invention may, however, be embodied in many different forms and should not be construed as limited to the embodiments set forth herein.

[0045] Unless defined otherwise, all technical and scientific terms used herein have the same meaning as commonly understood to one of ordinary skill in the art to which this disclosure belongs. The term “comprising” and variations thereof as used herein is used synonymously with the term “including” and variations thereof and are open, non-limiting terms. Although the terms “comprising” and “including” have been used herein to describe various embodiments, the terms “consisting essentially of” and “consisting of” can be used in place of “comprising” and “including” to provide for more specific embodiments and are also disclosed. As used in this disclosure and in the appended claims, the singular forms “a”, “an”, “the”, include plural referents unless the context clearly dictates otherwise.

[0046] The following definitions are provided for the full understanding of terms used in this specification.

### Terminology

[0047] The term “about” as used herein when referring to a measurable value such as an amount, a percentage, and the like, is meant to encompass variations of ±20%, ±10%, ±5%, or ±1% from the measurable value.

[0048] “Administration” to a subject or “administering” includes any route of introducing or delivering to a subject an agent. Administration can be carried out by any suitable route, including oral, intravenous, intraperitoneal, intranasal, inhalation and the like. Administration includes self-administration and the administration by another.

[0049] As used herein, the terms “may,” “optionally,” and “may optionally” are used interchangeably and are meant to include cases in which the condition occurs as well as cases in which the condition does not occur. Thus, for example, the statement that a formulation “may include an excipient” is meant to include cases in which the formulation includes an excipient as well as cases in which the formulation does not include an excipient.

[0050] As used herein, the term “subject” or “host” can refer to living organisms such as mammals, including, but not limited to humans, livestock, dogs, cats, and other mammals. Administration of the therapeutic agents can be carried out at dosages and for periods of time effective for treatment of a subject. In some embodiments, the subject is a human.

[0051] As used herein, the term “antigen” refers to a molecule that is capable of binding to an antibody. In some embodiments, the antigen stimulates an immune response such as by production of antibodies specific for the antigen.

[0052] In the present invention, “specific for” and “specificity” means a condition where one of the molecules is involved in selective binding. Accordingly, an antibody that is specific for one antigen selectively binds that antigen and not other antigens.

[0053] The term “antibodies” is used herein in a broad sense and includes both polyclonal and monoclonal antibodies. In addition to intact immunoglobulin molecules, also included in the term “antibodies” are fragments or polymers of those immunoglobulin molecules, and human or humanized versions of immunoglobulin molecules or fragments thereof. The antibodies can be tested for their desired activity using the in vitro assays described herein, or by analogous methods, after which their in vivo therapeutic and/or prophylactic activities are tested according to known clinical testing methods. Native antibodies are usually heterotetrameric glycoproteins of about 150,000 daltons, composed of two identical light (L) chains and two identical heavy (H) chains. Each heavy chain has at one end a variable domain (VH) followed by a number of constant domains. Each light chain has a variable domain at one end (VL) and a constant domain at its other end. There are five major classes of human immunoglobulins: IgA, IgD, IgE, IgG and IgM, and several of these may be further divided into subclasses (isotypes), e.g., IgG-1, IgG-2, IgG-3, and IgG-4; IgA-1 and IgA-2. One skilled in the art would recognize the comparable classes for mouse. The heavy chain constant domains that correspond to the different classes of immunoglobulins are called alpha, delta, epsilon, gamma, and mu, respectively.

[0054] Each antibody molecule is made up of the protein products of two genes: heavy-chain gene and light-chain gene. The heavy-chain gene is constructed through somatic recombination of V, D, and J gene segments. In human, there are 51 VH, 27 DH, 6 RI, 9 CH gene segments on human chromosome 14. The light-chain gene is constructed through somatic recombination of V and J gene segments. There are 40 Vκ, 31 Vλ, 5 Jκ, 4 Jλ gene segments on human chromosome 14 (80 VJ). The heavy-chain constant domains that correspond to the different classes of immunoglobulins are called α, δ, ε, γ, and μ, respectively. The “light chains” of antibodies from any vertebrate species can be assigned to one of two clearly distinct types, called kappa (κ) and lambda (λ), based on the amino acid sequences of their constant domains.

[0055] The term “monoclonal antibody” as used herein refers to an antibody obtained from a substantially homogeneous population of antibodies, i.e., the individual antibodies within the population are identical except for possible naturally occurring mutations that may be present in a small subset of the antibody molecules. The monoclonal antibodies herein specifically include “chimeric” antibodies in which a portion of the heavy and/or light chain is identical with or homologous to corresponding sequences in antibodies derived from a particular species or belonging to a particular antibody class or subclass, while the remainder of the chain(s) is identical with or homologous to corresponding sequences in antibodies derived from another species or belonging to another antibody class or subclass, as well as fragments of such antibodies, as long as they exhibit the desired antagonistic activity.

[0056] The disclosed monoclonal antibodies can be made using any procedure which produces monoclonal antibodies. For example, disclosed monoclonal antibodies can be prepared using hybridoma methods, such as those described by Kohler and Milstein, Nature, 256:495 (1975). In a hybridoma method, a mouse or other appropriate host animal is typically immunized with an immunizing agent to elicit lymphocytes that produce or are capable of producing antibodies that will specifically bind to the immunizing agent. Alternatively, the lymphocytes may be immunized in vitro.

[0057] The monoclonal antibodies may also be made by recombinant DNA methods. DNA encoding the disclosed monoclonal antibodies can be readily isolated and sequenced using conventional procedures (e.g., by using oligonucleotide probes that are capable of binding specifically to genes encoding the heavy and light chains of murine antibodies). Libraries of antibodies or active antibody fragments can also be generated and screened using phage display techniques, e.g., as described in U.S. Pat. No. 5,804,440 to Burton et al. and U.S. Pat. No. 6,096,441 to Barbas et al.

[0058] In vitro methods are also suitable for preparing monovalent antibodies. Digestion of antibodies to produce fragments thereof, particularly, Fab fragments, can be accomplished using routine techniques known in the art. For instance, digestion can be performed using papain. Examples of papain digestion are described in WO 94/29348 published Dec. 22, 1994 and U.S. Pat. No. 4,342,566. Papain digestion of antibodies typically produces two identical antigen binding fragments, called Fab fragments, each with a single antigen binding site, and a residual Fc fragment. Pepsin treatment yields a fragment that has two antigen combining sites and is still capable of cross-linking antigen.

[0059] As used herein, the term “antibody or antigen binding fragment thereof” or “antibody or fragments thereof” encompasses chimeric antibodies and hybrid antibodies, with dual or multiple antigen or epitope specificities, and fragments, such as F(ab′)2, Fab′, Fab, Fv, sFv, scFv, nanoantibody and the like, including hybrid fragments. Thus, fragments of the antibodies that retain the ability to bind their specific antigens are provided. Such antibodies and fragments can be made by techniques known in the art and can be screened for specificity and activity according to the methods set forth in the Examples and in general methods for producing antibodies and screening antibodies for specificity and activity (See Harlow and Lane. Antibodies, A Laboratory Manual. Cold Spring Harbor Publications, New York, (1988)).

[0060] The fragments, whether attached to other sequences or not, can also include insertions, deletions, substitutions, or other selected modifications of particular regions or specific amino acids residues, provided the activity of the antibody or antibody fragment is not significantly altered or impaired compared to the non-modified antibody or antibody fragment. These modifications can provide for some additional property, such as to remove/add amino acids capable of disulfide bonding, to increase its bio-longevity, to alter its secretory characteristics, etc. In any case, the antibody or antibody fragment must possess a bioactive property, such as specific binding to its cognate antigen. Functional or active regions of the antibody or antibody fragment may be identified by mutagenesis of a specific region of the protein, followed by expression and testing of the expressed polypeptide. Such methods are readily apparent to a skilled practitioner in the art and can include site-specific mutagenesis of the nucleic acid encoding the antibody or antibody fragment. (Zoller, M. J. Curr. Opin. Biotechnol. 3:348-354, 1992).

[0061] As used herein, the term “antibody” or “antibodies” can also refer to a human antibody and/or a humanized antibody. Many non-human antibodies (e.g., those derived from mice, rats, or rabbits) are naturally antigenic in humans, and thus can give rise to undesirable immune responses when administered to humans. Therefore, the use of human or humanized antibodies in the methods serves to lessen the chance that an antibody administered to a human will evoke an undesirable immune response.

[0062] The terms “antigen binding site”, “binding site” and “binding domain” refer to the specific elements, parts or amino acid residues of a polypeptide, such as an antibody, that bind the antigenic determinant or epitope.

[0063] An “antibody heavy chain,” as used herein, refers to the larger of the two types of polypeptide chains present in all antibody molecules in their naturally occurring conformations.

[0064] An “antibody light chain,” as used herein, refers to the smaller of the two types of polypeptide chains present in all antibody molecules in their naturally occurring conformations, κ and λ light chains refer to the two major antibody light chain isotypes.

[0065] The term “CDR” as used herein refers to the “complementarity determining regions” of the antibody which consist of the antigen binding loops. (Kabat E. A. et al., (1991) Sequences of proteins of immunological interest. NIH Publication 91-3242). Each of the two variable domains of an antibody Fv fragment contain, for example, three CDRs.

[0066] The term “hypervariable region” or “HVR”, as used herein, refers to each of the regions of an antibody variable domain which are hypervariable in sequence and/or form structurally defined loops (“hypervariable loops”). Generally, native four-chain antibodies comprise six HVRs; three in the VH (H1, H2, H3), and three in the VL (L1, L2, L3). HVRs generally comprise amino acid residues from the hypervariable loops and/or from the complementarity determining regions (CDRs), the latter being of highest sequence variability and/or involved in antigen recognition. With the exception of CDR1 in VH, CDRs generally comprise the amino acid residues that form the hypervariable loops. Hypervariable regions (HVRs) are also referred to as “complementarity determining regions” (CDRs), and these terms are used herein interchangeably in reference to portions of the variable region that form the antigen-binding regions. The amino acid sequence boundaries of a CDR can be determined by one of skill in the art using any of a number of known numbering schemes, including those described by Kabat et al., supra (“Kabat” numbering scheme): Al-Lazikani et al., 1997. J. Mol. Biol., 273:927-948 (“Chothia” numbering scheme); MacCallum et al., 1996, J. Mol. Biol, 262:732-745 (“Contact” numbering scheme); Lefranc et al., Dev. Comp. Immunol., 2003, 27:55-77 (“IMGT” numbering scheme); and Honegge and Plückthun, J. Mol. Biol., 2001, 309:657-70 (“AHo” numbering scheme); each of which is incorporated by reference in its entirety.

[0067] “Composition” refers to any agent that has a beneficial biological effect. Beneficial biological effects include both therapeutic effects, e.g., treatment of a disorder or other undesirable physiological condition, and prophylactic effects, e.g., prevention of a disorder or other undesirable physiological condition. The terms also encompass pharmaceutically acceptable, pharmacologically active derivatives of beneficial agents specifically mentioned herein, including, but not limited to, a bacterium, a vector, polynucleotide, cells, salts, esters, amides, proagents, active metabolites, isomers, fragments, analogs, and the like. When the term “composition” is used, then, or when a particular composition is specifically identified, it is to be understood that the term includes the composition per se as well as pharmaceutically acceptable, pharmacologically active vector, polynucleotide, salts, esters, amides, proagents, conjugates, active metabolites, isomers, fragments, analogs, etc.

[0068] “Effective amount” encompasses, without limitation, an amount that can ameliorate, reverse, mitigate, prevent, or diagnose a symptom or sign of a medical condition or disorder. Unless dictated otherwise, explicitly or by context, an “effective amount” is not limited to a minimal amount sufficient to ameliorate a condition. The severity of a disease or disorder, as well as the ability of a treatment to prevent, treat, or mitigate, the disease or disorder can be measured, without implying any limitation, by a biomarker or by a clinical parameter. In some embodiments, the term “effective amount of a recombinant antibody” refers to an amount of a recombinant antibody sufficient to prevent, treat, or mitigate a pathogen infection.

[0069] The “fragments” or “functional fragments,” whether attached to other sequences or not, can include insertions, deletions, substitutions, or other selected modifications of particular regions or specific amino acids residues, provided the activity of the fragment is not significantly altered or impaired compared to the nonmodified peptide or protein. These modifications can provide for some additional property, such as to remove or add amino acids capable of disulfide bonding, to increase its bio-longevity, to alter its secretory characteristics, etc. In any case, the functional fragment must possess a bioactive property, such as binding to an antigen, and/or ameliorating an infection.

[0070] The term “identity” or “homology” shall be construed to mean the percentage of nucleotide bases or amino acid residues in the candidate sequence that are identical with the bases or residues of a corresponding sequence to which it is compared, after aligning the sequences and introducing gaps, if necessary to achieve the maximum percent identity for the entire sequence, and not considering any conservative substitutions as part of the sequence identity. A polynucleotide or polynucleotide region (or a polypeptide or polypeptide region) that has a certain percentage (for example, 80%, 85%, 90%, or 95%) of “sequence identity” to another sequence means that, when aligned, that percentage of bases (or amino acids) are the same in comparing the two sequences. This alignment and the percent homology or sequence identity can be determined using software programs known in the art. Such alignment can be provided using, for instance, the method of Needleman et al. (1970) J. Mol. Biol. 48: 443-453, implemented conveniently by computer programs such as the Align program (DNAstar, Inc.).

[0071] The term “increased” or “increase” as used herein generally means an increase by a statically significant amount; for example, “increased” means an increase of at least 10% as compared to a reference level, for example an increase of at least about 20%, or at least about 30%, or at least about 40%, or at least about 50%, or at least about 60%, or at least about 70%, or at least about 80%, or at least about 90% or up to and including a 100% increase or any increase between 10-100% as compared to a reference level, or at least about a 2-fold, or at least about a 3-fold, or at least about a 4-fold, or at least about a 5-fold or at least about a 10-fold increase, or any increase between 2-fold and 10-fold or greater as compared to a reference level.

[0072] As used herein, the terms “nanobody”, “V_{H}H”, “V_{H}H antibody fragment” and “single domain antibody” are used indifferently and designate a variable domain of a single heavy chain of an antibody of the type found in Camelidae, which are without any light chains, such as those derived from Camelids as described in PCT Publication No. WO 94/04678, which is incorporated by reference in its entirety.

[0073] The term “reduced”, “reduce”, “reduction”, or “decrease” as used herein generally means a decrease by a statistically significant amount. However, for avoidance of doubt, “reduced” means a decrease by at least 10% as compared to a reference level, for example a decrease by at least about 20%, or at least about 30%, or at least about 40%, or at least about 50%, or at least about 60%, or at least about 70%, or at least about 80%, or at least about 90% or up to and including a 100% decrease (i.e. absent level as compared to a reference sample), or any decrease between 10-100% as compared to a reference level.

[0074] “Nucleotide,” “nucleoside,” “nucleotide residue,” and “nucleoside residue,” as used herein, can mean a deoxyribonucleotide, ribonucleotide residue, or another similar nucleoside analogue. A nucleotide is a molecule that contains a base moiety, a sugar moiety and a phosphate moiety. Nucleotides can be linked together through their phosphate moieties and sugar moieties creating an internucleoside linkage. The base moiety of a nucleotide can be adenin-9-yl (A), cytosin-1-yl (C), guanin-9-yl (G), uracil-1-yl (U), and thymin-1-yl (T). The sugar moiety of a nucleotide is a ribose or a deoxyribose. The phosphate moiety of a nucleotide is pentavalent phosphate. A non-limiting example of a nucleotide would be 3′-AMP (3′-adenosine monophosphate) or 5′-GMP (5′-guanosine monophosphate). There are many varieties of these types of molecules available in the art and available herein.

[0075] The method and the system disclosed here including the use of primers, which are capable of interacting with the disclosed nucleic acids, such as the antigen barcode as disclosed herein. In certain embodiments the primers are used to support DNA amplification reactions. Typically, the primers will be capable of being extended in a sequence specific manner. Extension of a primer in a sequence specific manner includes any methods wherein the sequence and/or composition of the nucleic acid molecule to which the primer is hybridized or otherwise associated directs or influences the composition or sequence of the product produced by the extension of the primer. Extension of the primer in a sequence specific manner therefore includes, but is not limited to, PCR, DNA sequencing, DNA extension, DNA polymerization, RNA transcription, or reverse transcription. Techniques and conditions that amplify the primer in a sequence specific manner are preferred. In certain embodiments the primers are used for the DNA amplification reactions, such as PCR or direct sequencing. It is understood that in certain embodiments the primers can also be extended using non-enzymatic techniques, where for example, the nucleotides or oligonucleotides used to extend the primer are modified such that they will chemically react to extend the primer in a sequence specific manner. Typically, the disclosed primers hybridize with the disclosed nucleic acids or region of the nucleic acids or they hybridize with the complement of the nucleic acids or complement of a region of the nucleic acids.

[0076] The term “amplification” refers to the production of one or more copies of a genetic fragment or target sequence, specifically the “amplicon”. As it refers to the product of an amplification reaction, amplicon is used interchangeably with common laboratory terms, such as “PCR product.”

[0077] The term “polypeptide” refers to a compound made up of a single chain of D- or L-amino acids or a mixture of D- and L-amino acids joined by peptide bonds.

[0078] “Encoding” refers to the inherent property of specific sequences of nucleotides in a polynucleotide, such as a gene, a cDNA, or an mRNA, to serve as templates for synthesis of other polymers and macromolecules in biological processes having either a defined sequence of nucleotides (i.e., rRNA, tRNA and mRNA) or a defined sequence of amino acids and the biological properties resulting therefrom. Thus, a gene encodes a protein if transcription and translation of mRNA.

[0079] An “expression cassette” refers to a DNA coding sequence or segment of DNA that code for an expression product that can be inserted into a vector at defined restriction sites. The cassette restriction sites are designed to ensure insertion of the cassette in the proper reading frame. Generally, foreign DNA is inserted at one or more restriction sites of the vector DNA, and then is carried by the vector into a host cell along with the transmissible vector DNA. A segment or sequence of DNA having inserted or added DNA, such as an expression vector, can also be called a “DNA construct”.

[0080] Expression vectors comprise the expression cassette and additionally usually comprise an origin for autonomous replication in the host cells or a genome integration site, one or more selectable markers (e.g. an amino acid synthesis gene or a gene conferring resistance to antibiotics such as zeocin, kanamycin, G418 or hygromycin), a number of restriction enzyme cleavage sites, a suitable promoter sequence and a transcription terminator, which components are operably linked together. The term “vector” as used herein includes autonomously replicating nucleotide sequences as well as genome integrating nucleotide sequences. A common type of vector is a “plasmid”, which generally is a self-contained molecule of double-stranded DNA that can readily accept additional (foreign) DNA and which can readily be introduced into a suitable host cell. A plasmid vector often contains coding DNA and promoter DNA and has one or more restriction sites suitable for inserting foreign DNA. Specifically, the term “vector” or “plasmid” refers to a vehicle by which a DNA or RNA sequence (e.g. a foreign gene) can be introduced into a host cell, so as to transform the host and promote expression (e.g. transcription and translation) of the introduced sequence.

[0081] The term “host cell” as used herein shall refer to primary subject cells trans-formed to produce a particular recombinant protein, such as an antibody as described herein, and any progeny thereof. It should be understood that not all progeny are exactly identical to the parental cell (due to deliberate or inadvertent mutations or differences in environment), however, such altered progeny are included in these terms, so long as the progeny retain the same functionality as that of the originally transformed cell. The term “host cell line” refers to a cell line of host cells as used for expressing a recombinant gene to produce recombinant polypeptides such as recombinant antibodies. The term “cell line” as used herein refers to an established clone of a particular cell type that has acquired the ability to proliferate over a prolonged period of time. Such host cell or host cell line may be maintained in cell culture and/or cultivated to produce a recombinant polypeptide.

[0082] The term “gene” or “gene sequence” refers to the coding sequence or control sequence, or fragments thereof. A gene may include any combination of coding sequence and control sequence, or fragments thereof. Thus, a “gene” as referred to herein may be all or part of a native gene. A polynucleotide sequence as referred to herein may be used interchangeably with the term “gene”, or may include any coding sequence, non-coding sequence or control sequence, fragments thereof, and combinations thereof. The term “gene” or “gene sequence” includes, for example, control sequences upstream of the coding sequence (for example, the ribosome binding site).

[0083] “Pharmaceutically acceptable carrier” (sometimes referred to as a “carrier”) means a carrier or excipient that is useful in preparing a pharmaceutical or therapeutic composition that is generally safe and non-toxic, and includes a carrier that is acceptable for veterinary and/or human pharmaceutical or therapeutic use. The terms “carrier” or “pharmaceutically acceptable carrier” can include, but are not limited to, phosphate buffered saline solution, water, emulsions (such as an oil/water or water/oil emulsion) and/or various types of wetting agents.

[0084] As used herein, the term “carrier” encompasses any excipient, diluent, filler, salt, buffer, stabilizer, solubilizer, lipid, stabilizer, or other material well known in the art for use in pharmaceutical formulations. The choice of a carrier for use in a composition will depend upon the intended route of administration for the composition. The preparation of pharmaceutically acceptable carriers and formulations containing these materials is described in, e.g., Remington's Pharmaceutical Sciences, 21st Edition, ed. University of the Sciences in Philadelphia, Lippincott, Williams & Wilkins, Philadelphia, Pa., 2005. Examples of physiologically acceptable carriers include saline, glycerol, DMSO, buffers such as phosphate buffers, citrate buffer, and buffers with other organic acids; antioxidants including ascorbic acid; low molecular weight (less than about 10 residues) polypeptides; proteins, such as serum albumin, gelatin, or immunoglobulins; hydrophilic polymers such as polyvinylpyrrolidone; amino acids such as glycine, glutamine, asparagine, arginine or lysine; monosaccharides, disaccharides, and other carbohydrates including glucose, mannose, or dextrins; chelating agents such as EDTA; sugar alcohols such as mannitol or sorbitol; salt-forming counterions such as sodium; and/or nonionic surfactants such as TWEEN™ (ICI, Inc.; Bridgewater, N.J.), polyethylene glycol (PEG), and PLURONICS™ (BASF; Florham Park, N.J.). To provide for the administration of such dosages for the desired therapeutic treatment, compositions disclosed herein can advantageously comprise between about 0.1% and 99% by weight of the total of one or more of the subject compounds based on the weight of the total composition including carrier or diluent.

[0085] The term “specificity” refers to the number of different types of antigens or antigenic determinants to which a particular antigen-binding molecule (such as the recombinant antibody of the invention) can bind. As used herein, the term “specifically binds,” as used herein with respect to a recombinant antibody refers to the recombinant antibody's preferential binding to one or more epitopes as compared with other epitopes. Specific binding can depend upon binding affinity and the stringency of the conditions under which the binding is conducted. In one example, an antibody specifically binds an epitope when there is high affinity binding under stringent conditions.

[0086] It should be understood that the specificity of an antigen-binding molecule (e.g., the recombinant antibodies of the present invention) can be determined based on affinity and/or avidity. The affinity, represented by the equilibrium constant for the dissociation of an antigen with an antigen-binding molecule (K_{D}), is a measure for the binding strength between an antigenic determinant and an antigen-binding site on the antigen-binding molecule: the lesser the value of the K_{D}, the stronger the binding strength between an antigenic determinant and the antigen-binding molecule (alternatively, the affinity can also be expressed as the affinity constant (KA), which is 1/K_{D}). As will be clear to the skilled person (for example on the basis of the further disclosure herein), affinity can be determined in a manner known per se, depending on the specific antigen of interest. Avidity is the measure of the strength of binding between an antigen-binding molecule (such as the recombinant antibodies of the present invention) and the pertinent antigen. Avidity is related to both the affinity between an antigenic determinant and its antigen binding site on the antigen-binding molecule and the number of pertinent binding sites present on the antigen-binding molecule. Typically, antigen-binding proteins (such as the recombinant antibodies of the invention) will bind to their antigen with a dissociation constant (K_{D}) of 10⁻⁵ to 10⁻¹² moles/liter or less, and preferably 10⁻⁷ to 10⁻¹² moles/liter or less, and more preferably 10⁻⁸ to 10⁻¹² moles/liter.

[0087] “Therapeutically effective amount” refers to the amount of a composition such as recombinant antibody that will elicit the biological or medical response of a tissue, system, animal, or human that is being sought by the researcher, veterinarian, medical doctor or other clinician over a generalized period of time. In some instances, a desired biological or medical response is achieved following administration of multiple dosages of the composition to the subject over a period of days, weeks, or years. The therapeutically effective amount will vary depending on the composition, the disorder or conditions and its severity, the route of administration, time of administration, rate of excretion, drug combination, judgment of the treating physician, dosage form, and the age, weight, general health, sex and/or diet of the subject to be treated. The therapeutically effective amount of recombinant antibodies as described herein can be determined by one of ordinary skill in the art.

[0088] A therapeutically significant reduction in a symptom is, e.g. at least about 10%, at least about 20%, at least about 30%, at least about 40%, at least about 50%, at least about 60%, at least about 70%, at least about 80%, at least about 90%, at least about 100%, at least about 125%, at least about 150% or more in a measured parameter as compared to a control or non-treated subject. Measured or measurable parameters include clinically detectable markers of disease, for example, elevated or depressed levels of a biological marker, such as decreased viral/bacterial titers, decreased viral RNA levels, and/or prolonged survival of a subject. It will be understood that the total daily usage of the compositions and formulations as disclosed herein will be decided by the attending physician within the scope of sound medical judgment. The exact amount required will vary depending on factors such as the type of disease being treated.

[0089] The terms “treat,” “treating,” “treatment,” and grammatical variations thereof as used herein, include partially or completely delaying, alleviating, mitigating or reducing the intensity of one or more attendant symptoms of a cancer or condition and/or alleviating, mitigating or impeding one or more causes of a cancer. Treatments according to the invention may be applied preventively, prophylactically, palliatively or remedially. Prophylactic treatments are administered to a subject prior to onset (e.g., before obvious signs of an infection), during early onset (e.g., upon initial signs and symptoms of an infection), after an established development of an infection, or during chronic infection. Prophylactic administration can occur for several minutes to months prior to the manifestation of an infection.

[0090] As used herein, the term “preventing” a disorder or unwanted physiological event in a subject refers specifically to the prevention of the occurrence of symptoms and/or their underlying cause, wherein the subject may or may not exhibit heightened susceptibility to the disorder or event.

### Antibodies and Methods

[0091] In some aspects, disclosed herein is method of treating a coronavirus infection in a subject in need comprising administering to the subject a therapeutically effective amount of a recombinant antibody, wherein the recombinant antibody comprises a light chain variable region (VL) that comprises a light chain complementarity determining region (CDRL)3 and/or a heavy chain variable region (VH) that comprises a heavy chain complementarity determining region (CDRH)3, wherein the CDRL3 comprises an amino acid sequence at least 60% (for example, at least 60%, at least 65%, at least 70%, at least 75%, at least 80%, at least 85%, at least 90%, at least 95%, at least 96%, at least 97%, at least 98%, or at least 99%) identical to CQQSYNVPTF (SEQ ID NO: 1884), and wherein the CDRH3 comprises an amino acid sequence at least 60% (for example, at least 60%, at least 65%, at least 70%, at least 75%, at least 80%, at least 85%, at least 90%, at least 95%, at least 96%, at least 97%, at least 98%, or at least 99%) identical to

(SEQ ID NO: 1818)
CAKGLTTESRLEFW.

[0092] In some embodiments, the CDRL3 comprises an amino acid sequence at least 60% (for example, at least 60%, at least 65%, at least 70%, at least 75%, at least 80%, at least 85%, at least 90%, at least 95%, at least 96%, or at least 97%, at least 98%, at least 99%) identical to

(SEQ ID NO: 1888)
CQVWDSSSEHVVF;
(SEQ ID NO: 1887)
CCLYAGSYSWVF;
(SEQ ID NO: 1883)
CMQPLQLPDTF;
(SEQ ID NO: 1884)
CQQSYNVPTF;
(SEQ ID NO: 1885)
CHQSSSLPFTF;
or
(SEQ ID NO: 1886)
CQHFYSSPPTF

and/or

[0093] the CDRH3 comprises an amino acid sequence at least 60% (for example, at least 60%, at least 65%, at least 70%, at least 75%, at least 80%, at least 85%, at least 90%, at least 95%, at least 96%, at least 97%, at least 98%, or at least 99%) identical to

(SEQ ID NO: 1822)
CARSEKRVTMTRKIKGRWFGPW;
(SEQ ID NO: 1821)
CARVAPPGVVNNKWFDIW;
(SEQ ID NO: 1817)
CAAGLWSGDLSRPRYSDSW;
(SEQ ID NO: 1818)
CAKGLTTESRLEFW;
(SEQ ID NO: 1819)
CVSSWGPESPYYFDYW;
(SEQ ID NO: 1820)
CAREYCTGGDCHFFLDYW;
or
(SEQ ID NO: 101)
QVWDSSSEHVV.

[0094] In some embodiments, the antibody comprises a light chain variable region (VL) that comprises a light chain complementarity determining region (CDRL)1, CDRL2, and CDRL3 and a heavy chain variable region (VH) that comprises a heavy chain complementarity determining region (CDRH)1, CDRH2, and CDRH3, wherein:
[0095] CDRH1 comprises an amino acid sequence at least 60% (for example, at least 60%, at least 65%, at least 70%, at least 75%, at least 80%, at least 85%, at least 90%, at least 95%, at least 96%, at least 97%, at least 98%, or at least 99%) identical to SEQ ID NO: 13102,
[0096] CDRH2 comprises an amino acid sequence at least 60% (for example, at least 60%, at least 65%, at least 70%, at least 75%, at least 80%, at least 85%, at least 90%, at least 95%, at least 96%, at least 97%, at least 98%, or at least 99%) identical to SEQ ID NO: 13108,
[0097] CDRH3 comprises an amino acid sequence at least 60% (for example, at least 60%, at least 65%, at least 70%, at least 75%, at least 80%, at least 85%, at least 90%, at least 95%, at least 96%, at least 97%, at least 98%, or at least 99%) identical to SEQ ID NO: 1817,
[0098] CDRL1 comprises an amino acid sequence at least 60% (for example, at least 60%, at least 65%, at least 70%, at least 75%, at least 80%, at least 85%, at least 90%, at least 95%, at least 96%, at least 97%, at least 98%, or at least 99%) identical to SEQ ID NO: 13120,
[0099] CDRL2 comprises an amino acid sequence at least 60% (for example, at least 60%, at least 65%, at least 70%, at least 75%, at least 80%, at least 85%, at least 90%, at least 95%, at least 96%, at least 97%, at least 98%, or at least 99%) identical to SEQ ID NO: 13126, and/or
[0100] CDRL3 comprises an amino acid sequence at least 60% (for example, at least 60%, at least 65%, at least 70%, at least 75%, at least 80%, at least 85%, at least 90%, at least 95%, at least 96%, at least 97%, at least 98%, or at least 99%) identical to SEQ ID NO: 13 or 1883.

[0101] In some embodiments, the antibody comprises a light chain variable region (VL) that comprises a light chain complementarity determining region (CDRL)1, CDRL2, and CDRL3 and a heavy chain variable region (VH) that comprises a heavy chain complementarity determining region (CDRH)1, CDRH2, and CDRH3, wherein:
[0102] CDRH1 comprises an amino acid sequence at least 60% (for example, at least 60%, at least 65%, at least 70%, at least 75%, at least 80%, at least 85%, at least 90%, at least 95%, at least 96%, at least 97%, at least 98%, or at least 99%) identical to SEQ ID NO: 13103,
[0103] CDRH2 comprises an amino acid sequence at least 60% (for example, at least 60%, at least 65%, at least 70%, at least 75%, at least 80%, at least 85%, at least 90%, at least 95%, at least 96%, at least 97%, at least 98%, or at least 99%) identical to SEQ ID NO: 13109,
[0104] CDRH3 comprises an amino acid sequence at least 60% (for example, at least 60%, at least 65%, at least 70%, at least 75%, at least 80%, at least 85%, at least 90%, at least 95%, at least 96%, at least 97%, at least 98%, or at least 99%) identical to SEQ ID NO: 1818,
[0105] CDRL1 comprises an amino acid sequence at least 60% (for example, at least 60%, at least 65%, at least 70%, at least 75%, at least 80%, at least 85%, or at least 90%, at least 95%, at least 96%, at least 97%, at least 98%, or at least 99%) identical to SEQ ID NO: 13121,
[0106] CDRL2 comprises an amino acid sequence at least 60% (for example, at least 60%, at least 65%, at least 70%, at least 75%, at least 80%, at least 85%, at least 90%, at least 95%, at least 96%, at least 97%, at least 98%, or at least 99%) identical to SEQ ID NO: 13127, and/or
[0107] CDRL3 comprises an amino acid sequence at least 60% (for example, at least 60%, at least 65%, at least 70%, at least 75%, at least 80%, at least 85%, at least 90%, at least 95%, at least 96%, at least 97%, at least 98%, or at least 99%) identical to SEQ ID NO: 25 or 1884.

[0108] In some embodiments, the antibody comprises a light chain variable region (VL) that comprises a light chain complementarity determining region (CDRL)1, CDRL2, and CDRL3 and a heavy chain variable region (VH) that comprises a heavy chain complementarity determining region (CDRH)1, CDRH2, and CDRH3, wherein:
[0109] CDRH1 comprises an amino acid sequence at least 60% (for example, at least 60%, at least 65%, at least 70%, at least 75%, at least 80%, at least 85%, at least 90%, at least 95%, at least 96%, at least 97%, at least 98%, or at least 99%) identical to SEQ ID NO: 13104,
[0110] CDRH2 comprises an amino acid sequence at least 60% (for example, at least 60%, at least 65%, at least 70%, at least 75%, at least 80%, at least 85%, at least 90%, at least 95%, at least 96%, at least 97%, at least 98%, or at least 99%) identical to SEQ ID NO: 13110,
[0111] CDRH3 comprises an amino acid sequence at least 60% (for example, at least 60%, at least 65%, at least 70%, at least 75%, at least 80%, at least 85%, at least 90%, at least 95%, at least 96%, at least 97%, at least 98%, or at least 99%) identical to SEQ ID NO: 1819,
[0112] CDRL1 comprises an amino acid sequence at least 60% (for example, at least 60%, at least 65%, at least 70%, at least 75%, at least 80%, at least 85%, at least 90%, at least 95%, at least 96%, at least 97%, at least 98%, or at least 99%) identical to SEQ ID NO: 13122,
[0113] CDRL2 comprises an amino acid sequence at least 60% (for example, at least 60%, at least 65%, at least 70%, at least 75%, at least 80%, at least 85%, at least 90%, at least 95%, at least 96%, at least 97%, at least 98%, or at least 99%) identical to SEQ ID NO: 13108, and/or
[0114] CDRL3 comprises an amino acid sequence at least 60% (for example, at least 60%, at least 65%, at least 70%, at least 75%, at least 80%, at least 85%, at least 90%, at least 95%, at least 96%, at least 97%, at least 98%, or at least 99%) identical to SEQ ID NO: 39 or 1885.

[0115] In some embodiments, the antibody comprises a light chain variable region (VL) that comprises a light chain complementarity determining region (CDRL)1, CDRL2, and CDRL3 and a heavy chain variable region (VH) that comprises a heavy chain complementarity determining region (CDRH)1, CDRH2, and CDRH3, wherein:
[0116] CDRH1 comprises an amino acid sequence at least 60% (for example, at least 60%, at least 65%, at least 70%, at least 75%, at least 80%, at least 85%, at least 90%, at least 95%, at least 96%, at least 97%, at least 98%, or at least 99%) identical to SEQ ID NO: 13105,
[0117] CDRH2 comprises an amino acid sequence at least 60% (for example, at least 60%, at least 65%, at least 70%, at least 75%, at least 80%, at least 85%, at least 90%, at least 95%, at least 96%, at least 97%, at least 98%, or at least 99%) identical to SEQ ID NO: 13111,
[0118] CDRH3 comprises an amino acid sequence at least 60% (for example, at least 60%, at least 65%, at least 70%, at least 75%, at least 80%, at least 85%, at least 90%, at least 95%, at least 96%, at least 97%, at least 98%, or at least 99%) identical to SEQ ID NO: 1820,
[0119] CDRL1 comprises an amino acid sequence at least 60% (for example, at least 60%, at least 65%, at least 70%, at least 75%, at least 80%, at least 85%, at least 90%, at least 95%, at least 96%, at least 97%, at least 98%, or at least 99%) identical to SEQ ID NO: 13123,
[0120] CDRL2 comprises an amino acid sequence at least 60% (for example, at least 60%, at least 65%, at least 70%, at least 75%, at least 80%, at least 85%, at least 90%, at least 95%, at least 96%, at least 97%, at least 98%, or at least 99%) identical to SEQ ID NO: 13129, and/or
[0121] CDRL3 comprises an amino acid sequence at least 60% (for example, at least 60%, at least 65%, at least 70%, at least 75%, at least 80%, at least 85%, at least 90%, at least 95%, at least 96%, at least 97%, at least 98%, or at least 99%) identical to SEQ ID NO: 49 or 1886.

[0122] In some embodiments, the antibody comprises a light chain variable region (VL) that comprises a light chain complementarity determining region (CDRL)1, CDRL2, and CDRL3 and a heavy chain variable region (VH) that comprises a heavy chain complementarity determining region (CDRH)1, CDRH2, CDRH3, wherein:
[0123] CDRH1 comprises an amino acid sequence at least 60% (for example, at least 60%, at least 65%, at least 70%, at least 75%, at least 80%, at least 85%, at least 90%, at least 95%, at least 96%, at least 97%, at least 98%, or at least 99%) identical to SEQ ID NO: 13106,
[0124] CDRH2 comprises an amino acid sequence at least 60% (for example, at least 60%, at least 65%, at least 70%, at least 75%, at least 80%, at least 85%, at least 90%, at least 95%, at least 96%, at least 97%, at least 98%, or at least 99%) identical to SEQ ID NO: 13112,
[0125] CDRH3 comprises an amino acid sequence at least 60% (for example, at least 60%, at least 65%, at least 70%, at least 75%, at least 80%, at least 85%, at least 90%, at least 95%, at least 96%, at least 97%, at least 98%, or at least 99%) identical to SEQ ID NO: 104 or 1821,
[0126] CDRL1 comprises an amino acid sequence at least 60% (for example, at least 60%, at least 65%, at least 70%, at least 75%, at least 80%, at least 85%, at least 90%, at least 95%, at least 96%, at least 97%, at least 98%, or at least 99%) identical to SEQ ID NO: 13124,
[0127] CDRL2 comprises an amino acid sequence at least 60% (for example, at least 60%, at least 65%, at least 70%, at least 75%, at least 80%, at least 85%, at least 90%, at least 95%, at least 96%, at least 97%, at least 98%, or at least 99%) identical to SEQ ID NO: 13130, and/or
[0128] CDRL3 comprises an amino acid sequence at least 60% (for example, at least 60%, at least 65%, at least 70%, at least 75%, at least 80%, at least 85%, at least 90%, at least 95%, at least 96%, at least 97%, at least 98%, or at least 99%) identical to SEQ ID NO: 88 or 1887.

[0129] In some embodiments, the antibody comprises a light chain variable region (VL) that comprises a light chain complementarity determining region (CDRL)1, CDRL2, and CDRL3 and a heavy chain variable region (VH) that comprises a heavy chain complementarity determining region (CDRH)1, CDRH2, and CDRH3, wherein:
[0130] CDRH1 comprises an amino acid sequence at least 60% (for example, at least 60%, at least 65%, at least 70%, at least 75%, at least 80%, at least 85%, at least 90%, at least 95%, at least 96%, at least 97%, at least 98%, or at least 99%) identical to SEQ ID NO: 13107.
[0131] CDRH2 comprises an amino acid sequence at least 60% (for example, at least 60%, at least 65%, at least 70%, at least 75%, at least 80%, at least 85%, at least 90%, at least 95%, at least 96%, at least 97%, at least 98%, or at least 99%) identical to SEQ ID NO: 13113,
[0132] CDRH3 comprises an amino acid sequence at least 60% (for example, at least 60%, at least 65%, at least 70%, at least 75%, at least 80%, at least 85%, at least 90%, at least 95%, at least 96%, at least 97%, at least 98%, or at least 99%) identical to SEQ ID NO: 110 or 1822,
[0133] CDRL1 comprises an amino acid sequence at least 60% (for example, at least 60%, at least 65%, at least 70%, at least 75%, at least 80%, at least 85%, at least 90%, at least 95%, at least 96%, at least 97%, at least 98%, or at least 99%) identical to SEQ ID NO: 13125,
[0134] CDRL2 comprises an amino acid sequence at least 60% (for example, at least 60%, at least 65%, at least 70%, at least 75%, at least 80%, at least 85%, at least 90%, at least 95%, at least 96%, at least 97%, at least 98%, or at least 99%) identical to SEQ ID NO: 13131, and/or
[0135] CDRL3 comprises an amino acid sequence at least 60% (for example, at least 60%, at least 65%, at least 70%, at least 75%, at least 80%, at least 85%, at least 90%, at least 95%, at least 96%, at least 97%, at least 98%, or at least 99%) identical to SEQ ID NO: 101 or 1888.

[0136] In some embodiments, the antibody comprises a light chain variable region (VL) that comprises a light chain complementarity determining region (CDRL)1, CDRL2, and CDRL3 and a heavy chain variable region (VH) that comprises a heavy chain complementarity determining region (CDRH)1, CDRH2, and CDRH3, wherein:
[0137] CDRH1 is SEQ ID NO: 13102,
[0138] CDRH2 is SEQ ID NO: 13108,
[0139] CDRH3 is SEQ ID NO: 1817,
[0140] CDRL1 is SEQ ID NO: 13120,
[0141] CDRL2 is SEQ ID NO: 13126, and
[0142] CDRL3 is SEQ ID NO: 13 or 1883.

[0143] In some embodiments, the antibody comprises a light chain variable region (VL) that comprises a light chain complementarity determining region (CDRL)1, CDRL2, and CDRL3 and a heavy chain variable region (VH) that comprises a heavy chain complementarity determining region (CDRH)1, CDRH2, CDRH3, wherein:
[0144] CDRH1 is SEQ ID NO: 13103,
[0145] CDRH2 is SEQ ID NO: 13109,
[0146] CDRH3 is SEQ ID NO: 1818,
[0147] CDRL1 is SEQ ID NO: 13121,
[0148] CDRL2 is SEQ ID NO: 13127, and
[0149] CDRL3 is SEQ ID NO: 25 or 1884.

[0150] In some embodiments, the antibody comprises a light chain variable region (VL) that comprises a light chain complementarity determining region (CDRL)1, CDRL2, and CDRL3 and a heavy chain variable region (VH) that comprises a heavy chain complementarity determining region (CDRH)1, CDRH2, and CDRH3, wherein:
[0151] CDRH1 is SEQ ID NO: 13104,
[0152] CDRH2 is SEQ ID NO: 13110,
[0153] CDRH3 is SEQ ID NO: 1819,
[0154] CDRL1 is SEQ ID NO: 13122,
[0155] CDRL2 is SEQ ID NO: 13128, and
[0156] CDRL3 is SEQ ID NO: 39 or 1885.

[0157] In some embodiments, the antibody comprises a light chain variable region (VL) that comprises a light chain complementarity determining region (CDRL)1, CDRL2, and CDRL3 and a heavy chain variable region (VH) that comprises a heavy chain complementarity determining region (CDRH)1, CDRH2, and CDRH3, wherein:
[0158] CDRH1 is SEQ ID NO: 13105,
[0159] CDRH2 is SEQ ID NO: 13111,
[0160] CDRH3 is SEQ ID NO: 1820,
[0161] CDRL1 is SEQ ID NO: 13123,
[0162] CDRL2 is SEQ ID NO: 13129, and
[0163] CDRL3 is SEQ ID NO: 49 or 1886.

[0164] In some embodiments, the antibody comprises a light chain variable region (VL) that comprises a light chain complementarity determining region (CDRL)1, CDRL2, and CDRL3 and a heavy chain variable region (VH) that comprises a heavy chain complementarity determining region (CDRH)1, CDRH2, and CDRH3, wherein:
[0165] CDRH1 is SEQ ID NO: 13106,
[0166] CDRH2 is SEQ ID NO: 13112,
[0167] CDRH3 is SEQ ID NO: 104 or 1821,
[0168] CDRL1 is SEQ ID NO: 13124,
[0169] CDRL2 is SEQ ID NO: 13130, and
[0170] CDRL3 is SEQ ID NO: 88 or 1887.

[0171] In some embodiments, the antibody comprises a light chain variable region (VL) that comprises a light chain complementarity determining region (CDRL)1, CDRL2, and CDRL3 and a heavy chain variable region (VH) that comprises a heavy chain complementarity determining region (CDRH)1, CDRH2, and CDRH3, wherein:
[0172] CDRH1 is SEQ ID NO: 13107,
[0173] CDRH2 is SEQ ID NO: 13113,
[0174] CDRH3 is SEQ ID NO: 110 or 1822,
[0175] CDRL1 is SEQ ID NO: 13125,
[0176] CDRL2 is SEQ ID NO: 13131, and
[0177] CDRL3 is SEQ ID NO: 101 or 1888.

[0178] In some embodiments, the method comprises administering to the subject the antibody disclosed in International Application Publication No. WO2020/206232, which is incorporated herein by reference in its entirety.

[0179] In some embodiments, the coronavirus comprises avian coronavirus (IBV), porcine coronavirus HKU15 (PorCoV HKU15), Porcine epidemic diarrhea virus (PEDV), HCoV-229E, HCoV-OC43, HCoV-HKU1, HCoV-NL63, SARS-CoV, SARS-CoV-2, or MERS-CoV. In some embodiments, the coronavirus comprises MERS-CoV, SARS-CoV, or SARS-CoV-2.

[0180] In some embodiments, the subject is co-infected by a pathogen. In some embodiments, the virus is selected from the group consisting of influenza A, influenza B, HIV, and HCV. In some embodiments, the bacterium is Escherichia coli.

[0181] In some aspects, disclosed herein is method of treating an influenza infection in a subject in need comprising administering to the subject a therapeutically effective amount of a recombinant antibody, wherein the recombinant antibody comprises a light chain variable region (VL) that comprises a light chain complementarity determining region (CDRL)3 and/or a heavy chain variable region (VH) that comprises a heavy chain complementarity determining region (CDRH)3, wherein the CDRL3 comprises an amino acid sequence at least 60% (for example, at least 60%, at least 65%, at least 70%, at least 75%, at least 80%, at least 85%, at least 90%, at least 95%, at least 96%, at least 97%, at least 98%, or at least 99%) identical to CQQSYNVPTF (SEQ ID NO: 1884), and wherein the CDRH3 comprises an amino acid sequence at least 60% (for example, at least 60%, at least 65%, at least 70%, at least 75%, at least 80%, at least 85%, at least 90%, at least 95%, at least 96%, at least 97%, at least 98%, or at least 99%) identical to

(SEQ ID NO: 1818)
CAKGLTTESRLEFW.

[0182] In some embodiments, the CDRL3 comprises an amino acid sequence at least 60% (for example, at least 60%, at least 65%, at least 70%, at least 75%, at least 80%, at least 85%, at least 90%, at least 95%, at least 96%, or at least 97%, at least 98%, at least 99%) identical to

(SEQ ID NO: 1888)
CQVWDSSSEHVVF;
(SEQ ID NO: 1887)
CCLYAGSYSWVF;
(SEQ ID NO: 1883)
CMQPLQLPDTF;
(SEQ ID NO: 1884)
CQQSYNVPTF;
(SEQ ID NO: 1885)
CHQSSSLPFTF;
or
(SEQ ID NO: 1886)
CQHFYSSPPTF

and/or

[0183] the CDRH3 comprises an amino acid sequence at least 60% (for example, at least 60%, at least 65%, at least 70%, at least 75%, at least 80%, at least 85%, at least 90%, at least 95%, at least 96%, at least 97%, at least 98%, or at least 99%) identical to

(SEQ ID NO: 1822)
CARSEKRVTMTRKIKGRWFGPW;
(SEQ ID NO: 1821)
CARVAPPGVVNNKWFDIW;
(SEQ ID NO: 1817)
CAAGLWSGDLSRPRYSDSW;
(SEQ ID NO: 1818)
CAKGLTTESRLEFW;
(SEQ ID NO: 1819)
CVSSWGPESPYYFDYW;
(SEQ ID NO: 1820)
CAREYCTGGDCHFFLDYW;
or
(SEQ ID NO: 101)
QVWDSSSEHVV.

[0184] In some embodiments, the antibody comprises a light chain variable region (VL) that comprises a light chain complementarity determining region (CDRL)1, CDRL2, and CDRL3 and a heavy chain variable region (VH) that comprises a heavy chain complementarity determining region (CDRH)1, CDRH2, and CDRH3, wherein:
[0185] CDRH1 comprises an amino acid sequence at least 60% (for example, at least 60%, at least 65%, at least 70%, at least 75%, at least 80%, at least 85%, at least 90%, at least 95%, at least 96%, at least 97%, at least 98%, or at least 99%) identical to SEQ ID NO: 13102,
[0186] CDRH2 comprises an amino acid sequence at least 60% (for example, at least 60%, at least 65%, at least 70%, at least 75%, at least 80%, at least 85%, at least 90%, at least 95%, at least 96%, at least 97%, at least 98%, or at least 99%) identical to SEQ ID NO: 13108,
[0187] CDRH3 comprises an amino acid sequence at least 60% (for example, at least 60%, at least 65%, at least 70%, at least 75%, at least 80%, at least 85%, at least 90%, at least 95%, at least 96%, at least 97%, at least 98%, or at least 99%) identical to SEQ ID NO: 1817,
[0188] CDRL1 comprises an amino acid sequence at least 60% (for example, at least 60%, at least 65%, at least 70%, at least 75%, at least 80%, at least 85%, at least 90%, at least 95%, at least 96%, at least 97%, at least 98%, or at least 99%) identical to SEQ ID NO: 13120,
[0189] CDRL2 comprises an amino acid sequence at least 60% (for example, at least 60%, at least 65%, at least 70%, at least 75%, at least 80%, at least 85%, at least 90%, at least 95%, at least 96%, at least 97%, at least 98%, or at least 99%) identical to SEQ ID NO: 13126, and/or
[0190] CDRL3 comprises an amino acid sequence at least 60% (for example, at least 60%, at least 65%, at least 70%, at least 75%, at least 80%, at least 85%, at least 90%, at least 95%, at least 96%, at least 97%, at least 98%, or at least 99%) identical to SEQ ID NO: 13 or 1883.

[0191] In some embodiments, the antibody comprises a light chain variable region (VL) that comprises a light chain complementarity determining region (CDRL)1, CDRL2, and CDRL3 and a heavy chain variable region (VH) that comprises a heavy chain complementarity determining region (CDRH)1, CDRH2, and CDRH3, wherein:
[0192] CDRH1 comprises an amino acid sequence at least 60% (for example, at least 60%, at least 65%, at least 70%, at least 75%, at least 80%, at least 85%, at least 90%, at least 95%, at least 96%, at least 97%, at least 98%, or at least 99%) identical to SEQ ID NO: 13103,
[0193] CDRH2 comprises an amino acid sequence at least 60% (for example, at least 60%, at least 65%, at least 70%, at least 75%, at least 80%, at least 85%, at least 90%, at least 95%, at least 96%, at least 97%, at least 98%, or at least 99%) identical to SEQ ID NO: 13109,
[0194] CDRH3 comprises an amino acid sequence at least 60% (for example, at least 60%, at least 65%, at least 70%, at least 75%, at least 80%, at least 85%, at least 90%, at least 95%, at least 96%, at least 97%, at least 98%, or at least 99%) identical to SEQ ID NO: 1818,
[0195] CDRL1 comprises an amino acid sequence at least 60% (for example, at least 60%, at least 65%, at least 70%, at least 75%, at least 80%, at least 85%, or at least 90%, at least 95%, at least 96%, at least 97%, at least 98%, or at least 99%) identical to SEQ ID NO: 13121,
[0196] CDRL2 comprises an amino acid sequence at least 60% (for example, at least 60%, at least 65%, at least 70%, at least 75%, at least 80%, at least 85%, at least 90%, at least 95%, at least 96%, at least 97%, at least 98%, or at least 99%) identical to SEQ ID NO: 13127, and/or
[0197] CDRL3 comprises an amino acid sequence at least 60% (for example, at least 60%, at least 65%, at least 70%, at least 75%, at least 80%, at least 85%, at least 90%, at least 95%, at least 96%, at least 97%, at least 98%, or at least 99%) identical to SEQ ID NO: 25 or 1884.

[0198] In some embodiments, the antibody comprises a light chain variable region (VL) that comprises a light chain complementarity determining region (CDRL)1, CDRL2, and CDRL3 and a heavy chain variable region (VH) that comprises a heavy chain complementarity determining region (CDRH)1, CDRH2, and CDRH3, wherein:
[0199] CDRH1 comprises an amino acid sequence at least 60% (for example, at least 60%, at least 65%, at least 70%, at least 75%, at least 80%, at least 85%, at least 90%, at least 95%, at least 96%, at least 97%, at least 98%, or at least 99%) identical to SEQ ID NO: 13104,
[0200] CDRH2 comprises an amino acid sequence at least 60% (for example, at least 60%, at least 65%, at least 70%, at least 75%, at least 80%, at least 85%, at least 90%, at least 95%, at least 96%, at least 97%, at least 98%, or at least 99%) identical to SEQ ID NO: 13110,
[0201] CDRH3 comprises an amino acid sequence at least 60% (for example, at least 60%, at least 65%, at least 70%, at least 75%, at least 80%, at least 85%, at least 90%, at least 95%, at least 96%, at least 97%, at least 98%, or at least 99%) identical to SEQ ID NO: 1819,
[0202] CDRL1 comprises an amino acid sequence at least 60% (for example, at least 60%, at least 65%, at least 70%, at least 75%, at least 80%, at least 85%, at least 90%, at least 95%, at least 96%, at least 97%, at least 98%, or at least 99%) identical to SEQ ID NO: 13122,
[0203] CDRL2 comprises an amino acid sequence at least 60% (for example, at least 60%, at least 65%, at least 70%, at least 75%, at least 80%, at least 85%, at least 90%, at least 95%, at least 96%, at least 97%, at least 98%, or at least 99%) identical to SEQ ID NO: 13108, and/or
[0204] CDRL3 comprises an amino acid sequence at least 60% (for example, at least 60%, at least 65%, at least 70%, at least 75%, at least 80%, at least 85%, at least 90%, at least 95%, at least 96%, at least 97%, at least 98%, or at least 99%) identical to SEQ ID NO: 39 or 1885.

[0205] In some embodiments, the antibody comprises a light chain variable region (VL) that comprises a light chain complementarity determining region (CDRL)1, CDRL2, and CDRL3 and a heavy chain variable region (VH) that comprises a heavy chain complementarity determining region (CDRH)1, CDRH2, and CDRH3, wherein:
[0206] CDRH1 comprises an amino acid sequence at least 60% (for example, at least 60%, at least 65%, at least 70%, at least 75%, at least 80%, at least 85%, at least 90%, at least 95%, at least 96%, at least 97%, at least 98%, or at least 99%) identical to SEQ ID NO: 13105,
[0207] CDRH2 comprises an amino acid sequence at least 60% (for example, at least 60%, at least 65%, at least 70%, at least 75%, at least 80%, at least 85%, at least 90%, at least 95%, at least 96%, at least 97%, at least 98%, or at least 99%) identical to SEQ ID NO: 13111,
[0208] CDRH3 comprises an amino acid sequence at least 60% (for example, at least 60%, at least 65%, at least 70%, at least 75%, at least 80%, at least 85%, at least 90%, at least 95%, at least 96%, at least 97%, at least 98%, or at least 99%) identical to SEQ ID NO: 1820,
[0209] CDRL1 comprises an amino acid sequence at least 60% (for example, at least 60%, at least 65%, at least 70%, at least 75%, at least 80%, at least 85%, at least 90%, at least 95%, at least 96%, at least 97%, at least 98%, or at least 99%) identical to SEQ ID NO: 13123,
[0210] CDRL2 comprises an amino acid sequence at least 60% (for example, at least 60%, at least 65%, at least 70%, at least 75%, at least 80%, at least 85%, at least 90%, at least 95%, at least 96%, at least 97%, at least 98%, or at least 99%) identical to SEQ ID NO: 13129, and/or
[0211] CDRL3 comprises an amino acid sequence at least 60% (for example, at least 60%, at least 65%, at least 70%, at least 75%, at least 80%, at least 85%, at least 90%, at least 95%, at least 96%, at least 97%, at least 98%, or at least 99%) identical to SEQ ID NO: 49 or 1886.

[0212] In some embodiments, the antibody comprises a light chain variable region (VL) that comprises a light chain complementarity determining region (CDRL)1, CDRL2, and CDRL3 and a heavy chain variable region (VH) that comprises a heavy chain complementarity determining region (CDRH)1, CDRH2, CDRH3, wherein:
[0213] CDRH1 comprises an amino acid sequence at least 60% (for example, at least 60%, at least 65%, at least 70%, at least 75%, at least 80%, at least 85%, at least 90%, at least 95%, at least 96%, at least 97%, at least 98%, or at least 99%) identical to SEQ ID NO: 13106,
[0214] CDRH2 comprises an amino acid sequence at least 60% (for example, at least 60%, at least 65%, at least 70%, at least 75%, at least 80%, at least 85%, at least 90%, at least 95%, at least 96%, at least 97%, at least 98%, or at least 99%) identical to SEQ ID NO: 13112,
[0215] CDRH3 comprises an amino acid sequence at least 60% (for example, at least 60%, at least 65%, at least 70%, at least 75%, at least 80%, at least 85%, at least 90%, at least 95%, at least 96%, at least 97%, at least 98%, or at least 99%) identical to SEQ ID NO: 104 or 1821,
[0216] CDRL1 comprises an amino acid sequence at least 60% (for example, at least 60%, at least 65%, at least 70%, at least 75%, at least 80%, at least 85%, at least 90%, at least 95%, at least 96%, at least 97%, at least 98%, or at least 99%) identical to SEQ ID NO: 13124,
[0217] CDRL2 comprises an amino acid sequence at least 60% (for example, at least 60%, at least 65%, at least 70%, at least 75%, at least 80%, at least 85%, at least 90%, at least 95%, at least 96%, at least 97%, at least 98%, or at least 99%) identical to SEQ ID NO: 13130, and/or
[0218] CDRL3 comprises an amino acid sequence at least 60% (for example, at least 60%, at least 65%, at least 70%, at least 75%, at least 80%, at least 85%, at least 90%, at least 95%, at least 96%, at least 97%, at least 98%, or at least 99%) identical to SEQ ID NO: 88 or 1887.

[0219] In some embodiments, the antibody comprises a light chain variable region (VL) that comprises a light chain complementarity determining region (CDRL)1, CDRL2, and CDRL3 and a heavy chain variable region (VH) that comprises a heavy chain complementarity determining region (CDRH)1, CDRH2, and CDRH3, wherein:
[0220] CDRH1 comprises an amino acid sequence at least 60% (for example, at least 60%, at least 65%, at least 70%, at least 75%, at least 80%, at least 85%, at least 90%, at least 95%, at least 96%, at least 97%, at least 98%, or at least 99%) identical to SEQ ID NO: 13107,
[0221] CDRH2 comprises an amino acid sequence at least 60% (for example, at least 60%, at least 65%, at least 70%, at least 75%, at least 80%, at least 85%, at least 90%, at least 95%, at least 96%, at least 97%, at least 98%, or at least 99%) identical to SEQ ID NO: 13113,
[0222] CDRH3 comprises an amino acid sequence at least 60% (for example, at least 60%, at least 65%, at least 70%, at least 75%, at least 80%, at least 85%, at least 90%, at least 95%, at least 96%, at least 97%, at least 98%, or at least 99%) identical to SEQ ID NO: 110 or 1822,
[0223] CDRL1 comprises an amino acid sequence at least 60% (for example, at least 60%, at least 65%, at least 70%, at least 75%, at least 80%, at least 85%, at least 90%, at least 95%, at least 96%, at least 97%, at least 98%, or at least 99%) identical to SEQ ID NO: 13125,
[0224] CDRL2 comprises an amino acid sequence at least 60% (for example, at least 60%, at least 65%, at least 70%, at least 75%, at least 80%, at least 85%, at least 90%, at least 95%, at least 96%, at least 97%, at least 98%, or at least 99%) identical to SEQ ID NO: 13131, and/or
[0225] CDRL3 comprises an amino acid sequence at least 60% (for example, at least 60%, at least 65%, at least 70%, at least 75%, at least 80%, at least 85%, at least 90%, at least 95%, at least 96%, at least 97%, at least 98%, or at least 99%) identical to SEQ ID NO: 101 or 1888.

[0226] In some embodiments, the antibody comprises a light chain variable region (VL) that comprises a light chain complementarity determining region (CDRL)1, CDRL2, and CDRL3 and a heavy chain variable region (VH) that comprises a heavy chain complementarity determining region (CDRH)1, CDRH2, and CDRH3, wherein:
[0227] CDRH1 is SEQ ID NO: 13102,
[0228] CDRH2 is SEQ ID NO: 13108,
[0229] CDRH3 is SEQ ID NO: 1817,
[0230] CDRL1 is SEQ ID NO: 13120,
[0231] CDRL2 is SEQ ID NO: 13126, and
[0232] CDRL3 is SEQ ID NO: 13 or 1883.

[0233] In some embodiments, the antibody comprises a light chain variable region (VL) that comprises a light chain complementarity determining region (CDRL)1, CDRL2, and CDRL3 and a heavy chain variable region (VH) that comprises a heavy chain complementarity determining region (CDRH)1, CDRH2, CDRH3, wherein:
[0234] CDRH1 is SEQ ID NO: 13103,
[0235] CDRH2 is SEQ ID NO: 13109,
[0236] CDRH3 is SEQ ID NO: 1818,
[0237] CDRL1 is SEQ ID NO: 13121,
[0238] CDRL2 is SEQ ID NO: 13127, and
[0239] CDRL3 is SEQ ID NO: 25 or 1884.

[0240] In some embodiments, the antibody comprises a light chain variable region (VL) that comprises a light chain complementarity determining region (CDRL)1, CDRL2, and CDRL3 and a heavy chain variable region (VH) that comprises a heavy chain complementarity determining region (CDRH)1, CDRH2, and CDRH3, wherein:
[0241] CDRH1 is SEQ ID NO: 13104,
[0242] CDRH2 is SEQ ID NO: 13110,
[0243] CDRH3 is SEQ ID NO: 1819,
[0244] CDRL1 is SEQ ID NO: 13122,
[0245] CDRL2 is SEQ ID NO: 13128, and
[0246] CDRL3 is SEQ ID NO: 39 or 1885.

[0247] In some embodiments, the antibody comprises a light chain variable region (VL) that comprises a light chain complementarity determining region (CDRL)1, CDRL2, and CDRL3 and a heavy chain variable region (VH) that comprises a heavy chain complementarity determining region (CDRH)1, CDRH2, and CDRH3, wherein:
[0248] CDRH1 is SEQ ID NO: 13105,
[0249] CDRH2 is SEQ ID NO: 13111,
[0250] CDRH3 is SEQ ID NO: 1820,
[0251] CDRL1 is SEQ ID NO: 13123,
[0252] CDRL2 is SEQ ID NO: 13129, and
[0253] CDRL3 is SEQ ID NO: 49 or 1886.

[0254] In some embodiments, the antibody comprises a light chain variable region (VL) that comprises a light chain complementarity determining region (CDRL)1, CDRL2, and CDRL3 and a heavy chain variable region (VH) that comprises a heavy chain complementarity determining region (CDRH)1, CDRH2, and CDRH3, wherein:
[0255] CDRH1 is SEQ ID NO: 13106,
[0256] CDRH2 is SEQ ID NO: 13112,
[0257] CDRH3 is SEQ ID NO: 104 or 1821,
[0258] CDRL1 is SEQ ID NO: 13124,
[0259] CDRL2 is SEQ ID NO: 13130, and
[0260] CDRL3 is SEQ ID NO: 88 or 1887.

[0261] In some embodiments, the antibody comprises a light chain variable region (VL) that comprises a light chain complementarity determining region (CDRL)1, CDRL2, and CDRL3 and a heavy chain variable region (VH) that comprises a heavy chain complementarity determining region (CDRH)1, CDRH2, and CDRH3, wherein:
[0262] CDRH1 is SEQ ID NO: 13107,
[0263] CDRH2 is SEQ ID NO: 13113,
[0264] CDRH3 is SEQ ID NO: 110 or 1822,
[0265] CDRL1 is SEQ ID NO: 13125,
[0266] CDRL2 is SEQ ID NO: 13131, and
[0267] CDRL3 is SEQ ID NO: 101 or 1888.

[0268] In some embodiments, the method comprises administering to the subject an antibody disclosed in WO2020/206232, which is incorporated herein by reference in its entirety.

[0269] In some embodiments, the influenza is influenza A or influenza B. In some embodiments, the subject is co-infected by a pathogen. In some embodiments, the pathogen is a virus or a bacterium. In some embodiments, the virus is selected from the group consisting of a coronavirus (including, but not limited to avian coronavirus (IBV), porcine coronavirus HKU15 (PorCoV HKU15), Porcine epidemic diarrhea virus (PEDV), HCoV-229E, HCoV-OC43, HCoV-HKU1, HCoV-NL63, SARS-CoV, SARS-CoV-2, or MERS-CoV), HIV, and HCV. In some embodiments, the bacterium is Escherichia coli.

[0270] In some aspects, disclosed herein is method of treating an Escherichia coli infection in a subject in need comprising administering to the subject a therapeutically effective amount of a recombinant antibody, wherein the recombinant antibody comprises a light chain variable region (VL) that comprises a light chain complementarity determining region (CDRL)3 and/or a heavy chain variable region (VH) that comprises a heavy chain complementarity determining region (CDRH)3, wherein the CDRL3 comprises an amino acid sequence at least 60% (for example, at least 60%, at least 65%, at least 70%, at least 75%, at least 80%, at least 85%, at least 90%, at least 95%, at least 96%, at least 97%, at least 98%, or at least 99%) identical to CQQSYNVPTF (SEQ ID NO: 1884), and wherein the CDRH3 comprises an amino acid sequence at least 60% (for example, at least 60%, at least 65%, at least 70%, at least 75%, at least 80%, at least 85%, at least 90%, at least 95%, at least 96%, at least 97%, at least 98%, or at least 99%) identical to

(SEQ ID NO: 1818)
CAKGLTTESRLEFW.

[0271] In some embodiments, the CDRL3 comprises an amino acid sequence at least 60% (for example, at least 60%, at least 65%, at least 70%, at least 75%, at least 80%, at least 85%, at least 90%, at least 95%, at least 96%, or at least 97%, at least 98%, at least 99%) identical to

(SEQ ID NO: 1888)
CQVWDSSSEHVVF;
(SEQ ID NO: 1887)
CCLYAGSYSWVF;
(SEQ ID NO: 1883)
CMQPLQLPDTF;
(SEQ ID NO: 1884)
CQQSYNVPTF;
(SEQ ID NO: 1885)
CHQSSSLPFTF;
or
(SEQ ID NO: 1886)
CQHFYSSPPTF

and/or

[0272] the CDRH3 comprises an amino acid sequence at least 60% (for example, at least 60%, at least 65%, at least 70%, at least 75%, at least 80%, at least 85%, at least 90%, at least 95%, at least 96%, at least 97%, at least 98%, or at least 99%) identical to

(SEQ ID NO: 1822)
CARSEKRVTMTRKIKGRWFGPW;
(SEQ ID NO: 1821)
CARVAPPGVVNNKWFDIW;
(SEQ ID NO: 1817)
CAAGLWSGDLSRPRYSDSW;
(SEQ ID NO: 1818)
CAKGLTTESRLEFW;
(SEQ ID NO: 1819)
CVSSWGPESPYYFDYW;
(SEQ ID NO: 1820)
CAREYCTGGDCHFFLDYW;
or
(SEQ ID NO: 101)
QVWDSSSEHVV.

[0273] In some embodiments, the antibody comprises a light chain variable region (VL) that comprises a light chain complementarity determining region (CDRL)1, CDRL2, and CDRL3 and a heavy chain variable region (VH) that comprises a heavy chain complementarity determining region (CDRH)1, CDRH2, and CDRH3, wherein:
[0274] CDRH1 comprises an amino acid sequence at least 60% (for example, at least 60%, at least 65%, at least 70%, at least 75%, at least 80%, at least 85%, at least 90%, at least 95%, at least 96%, at least 97%, at least 98%, or at least 99%) identical to SEQ ID NO: 13102,
[0275] CDRH2 comprises an amino acid sequence at least 60% (for example, at least 60%, at least 65%, at least 70%, at least 75%, at least 80%, at least 85%, at least 90%, at least 95%, at least 96%, at least 97%, at least 98%, or at least 99%) identical to SEQ ID NO: 13108,
[0276] CDRH3 comprises an amino acid sequence at least 60% (for example, at least 60%, at least 65%, at least 70%, at least 75%, at least 80%, at least 85%, or at least 90%, at least 95%, at least 96%, at least 97%, at least 98%, or at least 99%) identical to SEQ ID NO: 1817,
[0277] CDRL1 comprises an amino acid sequence at least 60% (for example, at least 60%, at least 65%, at least 70%, at least 75%, at least 80%, at least 85%, at least 90%, at least 95%, at least 96%, at least 97%, at least 98%, or at least 99%) identical to SEQ ID NO: 13120,
[0278] CDRL2 comprises an amino acid sequence at least 60% (for example, at least 60%, at least 65%, at least 70%, at least 75%, at least 80%, at least 85%, at least 90%, at least 95%, at least 96%, at least 97%, at least 98%, or at least 99%) identical to SEQ ID NO: 13126, and/or
[0279] CDRL3 comprises an amino acid sequence at least 60% (for example, at least 60%, at least 65%, at least 70%, at least 75%, at least 80%, at least 85%, at least 90%, at least 95%, at least 96%, at least 97%, at least 98%, or at least 99%) identical to SEQ ID NO: 13 or 1883.

[0280] In some embodiments, the antibody comprises a light chain variable region (VL) that comprises a light chain complementarity determining region (CDRL)1, CDRL2, and CDRL3 and a heavy chain variable region (VH) that comprises a heavy chain complementarity determining region (CDRH)1, CDRH2, and CDRH3, wherein:
[0281] CDRH1 comprises an amino acid sequence at least 60% (for example, at least 60%, at least 65%, at least 70%, at least 75%, at least 80%, at least 85%, at least 90%, at least 95%, at least 96%, at least 97%, at least 98%, or at least 99%) identical to SEQ ID NO: 13103,
[0282] CDRH2 comprises an amino acid sequence at least 60% (for example, at least 60%, at least 65%, at least 70%, at least 75%, at least 80%, at least 85%, at least 90%, at least 95%, at least 96%, at least 97%, at least 98%, or at least 99%) identical to SEQ ID NO: 13109,
[0283] CDRH3 comprises an amino acid sequence at least 60% (for example, at least 60%, at least 65%, at least 70%, at least 75%, at least 80%, at least 85%, at least 90%, at least 95%, at least 96%, at least 97%, at least 98%, or at least 99%) identical to SEQ ID NO: 1818,
[0284] CDRL1 comprises an amino acid sequence at least 60% (for example, at least 60%, at least 65%, at least 70%, at least 75%, at least 80%, at least 85%, at least 90%, at least 95%, at least 96%, at least 97%, at least 98%, or at least 99%) identical to SEQ ID NO: 13121,
[0285] CDRL2 comprises an amino acid sequence at least 60% (for example, at least 60%, at least 65%, at least 70%, at least 75%, at least 80%, at least 85%, at least 90%, at least 95%, at least 96%, at least 97%, at least 98%, or at least 99%) identical to SEQ ID NO: 13127, and/or
[0286] CDRL3 comprises an amino acid sequence at least 60% (for example, at least 60%, at least 65%, at least 70%, at least 75%, at least 80%, at least 85%, at least 90%, at least 95%, at least 96%, at least 97%, at least 98%, or at least 99%) identical to SEQ ID NO: 25 or 1884.

[0287] In some embodiments, the antibody comprises a light chain variable region (VL) that comprises a light chain complementarity determining region (CDRL)1, CDRL2, and CDRL3 and a heavy chain variable region (VH) that comprises a heavy chain complementarity determining region (CDRH)1, CDRH2, and CDRH3, wherein:
[0288] CDRH1 comprises an amino acid sequence at least 60% (for example, at least 60%, at least 65%, at least 70%, at least 75%, at least 80%, at least 85%, at least 90%, at least 95%, at least 96%, at least 97%, at least 98%, or at least 99%) identical to SEQ ID NO: 13104,
[0289] CDRH2 comprises an amino acid sequence at least 60% (for example, at least 60%, at least 65%, at least 70%, at least 75%, at least 80%, at least 85%, at least 90%, at least 95%, at least 96%, at least 97%, at least 98%, or at least 99%) identical to SEQ ID NO: 13110,
[0290] CDRH3 comprises an amino acid sequence at least 60% (for example, at least 60%, at least 65%, at least 70%, at least 75%, at least 80%, at least 85%, at least 90%, at least 95%, at least 96%, at least 97%, at least 98%, or at least 99%) identical to SEQ ID NO: 1819,
[0291] CDRL1 comprises an amino acid sequence at least 60% (for example, at least 60%, at least 65%, at least 70%, at least 75%, at least 80%, at least 85%, at least 90%, at least 95%, at least 96%, at least 97%, at least 98%, or at least 99%) identical to SEQ ID NO: 13122,
[0292] CDRL2 comprises an amino acid sequence at least 60% (for example, at least 60%, at least 65%, at least 70%, at least 75%, at least 80%, at least 85%, at least 90%, at least 95%, at least 96%, at least 97%, at least 98%, or at least 99%) identical to SEQ ID NO: 13128, and/or
[0293] CDRL3 comprises an amino acid sequence at least 60% (for example, at least 60%, at least 65%, at least 70%, at least 75%, at least 80%, at least 85%, or at least 90%, at least 95%, at least 96%, at least 97%, at least 98%, or at least 99%) identical to SEQ ID NO: 39 or 1885.

[0294] In some embodiments, the antibody comprises a light chain variable region (VL) that comprises a light chain complementarity determining region (CDRL)1, CDRL2, and CDRL3 and a heavy chain variable region (VH) that comprises a heavy chain complementarity determining region (CDRH)1, CDRH2, and CDRH3, wherein:
[0295] CDRH1 comprises an amino acid sequence at least 60% (for example, at least 60%, at least 65%, at least 70%, at least 75%, at least 80%, at least 85%, at least 90%, at least 95%, at least 96%, at least 97%, at least 98%, or at least 99%) identical to SEQ ID NO: 13105,
[0296] CDRH2 comprises an amino acid sequence at least 60% (for example, at least 60%, at least 65%, at least 70%, at least 75%, at least 80%, at least 85%, at least 90%, at least 95%, at least 96%, at least 97%, at least 98%, or at least 99%) identical to SEQ ID NO: 13111,
[0297] CDRH3 comprises an amino acid sequence at least 60% (for example, at least 60%, at least 65%, at least 70%, at least 75%, at least 80%, at least 85%, at least 90%, at least 95%, at least 96%, at least 97%, at least 98%, or at least 99%) identical to SEQ ID NO: 1820,
[0298] CDRL1 comprises an amino acid sequence at least 60% (for example, at least 60%, at least 65%, at least 70%, at least 75%, at least 80%, at least 85%, at least 90%, at least 95%, at least 96%, at least 97%, at least 98%, or at least 99%) identical to SEQ ID NO: 13123,
[0299] CDRL2 comprises an amino acid sequence at least 60% (for example, at least 60%, at least 65%, at least 70%, at least 75%, at least 80%, at least 85%, at least 90%, at least 95%, at least 96%, at least 97%, at least 98%, or at least 99%) identical to SEQ ID NO: 13129, and/or
[0300] CDRL3 comprises an amino acid sequence at least 60% (for example, at least 60%, at least 65%, at least 70%, at least 75%, at least 80%, at least 85%, at least 90%, at least 95%, at least 96%, at least 97%, at least 98%, or at least 99%) identical to SEQ ID NO: 49 or 1886.

[0301] In some embodiments, the antibody comprises a light chain variable region (VL) that comprises a light chain complementarity determining region (CDRL)1, CDRL2, and CDRL3 and a heavy chain variable region (VH) that comprises a heavy chain complementarity determining region (CDRH)1, CDRH2, CDRH3, wherein:
[0302] CDRH1 comprises an amino acid sequence at least 60% (for example, at least 60%, at least 65%, at least 70%, at least 75%, at least 80%, at least 85%, at least 90%, at least 95%, at least 96%, at least 97%, at least 98%, or at least 99%) identical to SEQ ID NO: 13106,
[0303] CDRH2 comprises an amino acid sequence at least 60% (for example, at least 60%, at least 65%, at least 70%, at least 75%, at least 80%, at least 85%, at least 90%, at least 95%, at least 96%, at least 97%, at least 98%, or at least 99%) identical to SEQ ID NO: 13112,
[0304] CDRH3 comprises an amino acid sequence at least 60% (for example, at least 60%, at least 65%, at least 70%, at least 75%, at least 80%, at least 85%, at least 90%, at least 95%, at least 96%, at least 97%, at least 98%, or at least 99%) identical to SEQ ID NO: 104 or 1821,
[0305] CDRL1 comprises an amino acid sequence at least 60% (for example, at least 60%, at least 65%, at least 70%, at least 75%, at least 80%, at least 85%, at least 90%, at least 95%, at least 96%, at least 97%, at least 98%, or at least 99%) identical to SEQ ID NO: 13124,
[0306] CDRL2 comprises an amino acid sequence at least 60% (for example, at least 60%, at least 65%, at least 70%, at least 75%, at least 80%, at least 85%, at least 90%, at least 95%, at least 96%, at least 97%, at least 98%, or at least 99%) identical to SEQ ID NO: 13130, and/or
[0307] CDRL3 comprises an amino acid sequence at least 60% (for example, at least 60%, at least 65%, at least 70%, at least 75%, at least 80%, at least 85%, at least 90%, at least 95%, at least 96%, at least 97%, at least 98%, or at least 99%) identical to SEQ ID NO: 88 or 1887.

[0308] In some embodiments, the antibody comprises a light chain variable region (VL) that comprises a light chain complementarity determining region (CDRL)1, CDRL2, and CDRL3 and a heavy chain variable region (VH) that comprises a heavy chain complementarity determining region (CDRH)1, CDRH2, and CDRH3, wherein:
[0309] CDRH1 comprises an amino acid sequence at least 60% (for example, at least 60%, at least 65%, at least 70%, at least 75%, at least 80%, at least 85%, at least 90%, at least 95%, at least 96%, at least 97%, at least 98%, or at least 99%) identical to SEQ ID NO: 13107,
[0310] CDRH2 comprises an amino acid sequence at least 60% (for example, at least 60%, at least 65%, at least 70%, at least 75%, at least 80%, at least 85%, or at least 90%, at least 95%, at least 96%, at least 97%, at least 98%, or at least 99%) identical to SEQ ID NO: 13113,
[0311] CDRH3 comprises an amino acid sequence at least 60% (for example, at least 60%, at least 65%, at least 70%, at least 75%, at least 80%, at least 85%, at least 90%, at least 95%, at least 96%, at least 97%, at least 98%, or at least 99%) identical to SEQ ID NO: 110 or 1822,
[0312] CDRL1 comprises an amino acid sequence at least 60% (for example, at least 60%, at least 65%, at least 70%, at least 75%, at least 80%, at least 85%, at least 90%, at least 95%, at least 96%, at least 97%, at least 98%, or at least 99%) identical to SEQ ID NO: 13125,
[0313] CDRL2 comprises an amino acid sequence at least 60% (for example, at least 60%, at least 65%, at least 70%, at least 75%, at least 80%, at least 85%, at least 90%, at least 95%, at least 96%, at least 97%, at least 98%, or at least 99%) identical to SEQ ID NO: 13131, and/or
[0314] CDRL3 comprises an amino acid sequence at least 60% (for example, at least 60%, at least 65%, at least 70%, at least 75%, at least 80%, at least 85%, at least 90%, at least 95%, at least 96%, at least 97%, at least 98%, or at least 99%) identical to SEQ ID NO: 101 or 1888.

[0315] In some embodiments, the antibody comprises a light chain variable region (VL) that comprises a light chain complementarity determining region (CDRL)1, CDRL2, and CDRL3 and a heavy chain variable region (VH) that comprises a heavy chain complementarity determining region (CDRH)1, CDRH2, and CDRH3, wherein:
[0316] CDRH1 is SEQ ID NO: 13102,
[0317] CDRH2 is SEQ ID NO: 13108,
[0318] CDRH3 is SEQ ID NO: 1817,
[0319] CDRL1 is SEQ ID NO: 13120,
[0320] CDRL2 is SEQ ID NO: 13126, and
[0321] CDRL3 is SEQ ID NO: 13 or 1883.

[0322] In some embodiments, the antibody comprises a light chain variable region (VL) that comprises a light chain complementarity determining region (CDRL)1, CDRL2, and CDRL3 and a heavy chain variable region (VH) that comprises a heavy chain complementarity determining region (CDRH)1, CDRH2, and CDRH3, wherein:
[0323] CDRH1 is SEQ ID NO: 13103,
[0324] CDRH2 is SEQ ID NO: 13109,
[0325] CDRH3 is SEQ ID NO: 1818,
[0326] CDRL1 is SEQ ID NO: 13121,
[0327] CDRL2 is SEQ ID NO: 13127, and
[0328] CDRL3 is SEQ ID NO: 25 or 1884.

[0329] In some embodiments, the antibody comprises a light chain variable region (VL) that comprises a light chain complementarity determining region (CDRL)1, CDRL2, and CDRL3 and a heavy chain variable region (VH) that comprises a heavy chain complementarity determining region (CDRH)1, CDRH2, and CDRH3, wherein:
[0330] CDRH1 is SEQ ID NO: 13104,
[0331] CDRH2 is SEQ ID NO: 13110,
[0332] CDRH3 is SEQ ID NO: 1819,
[0333] CDRL1 is SEQ ID NO: 13122,
[0334] CDRL2 is SEQ ID NO: 13128, and
[0335] CDRL3 is SEQ ID NO: 39 or 1885.

[0336] In some embodiments, the antibody comprises a light chain variable region (VL) that comprises a light chain complementarity determining region (CDRL)1, CDRL2, and CDRL3 and a heavy chain variable region (VH) that comprises a heavy chain complementarity determining region (CDRH)1, CDRH2, and CDRH3, wherein:
[0337] CDRH1 is SEQ ID NO: 13105,
[0338] CDRH2 is SEQ ID NO: 13111,
[0339] CDRH3 is SEQ ID NO: 1820,
[0340] CDRL1 is SEQ ID NO: 13123,
[0341] CDRL2 is SEQ ID NO: 13129, and
[0342] CDRL3 is SEQ ID NO: 49 or 1886.

[0343] In some embodiments, the antibody comprises a light chain variable region (VL) that comprises a light chain complementarity determining region (CDRL)1, CDRL2, and CDRL3 and a heavy chain variable region (VH) that comprises a heavy chain complementarity determining region (CDRH)1, CDRH2, and CDRH3, wherein:
[0344] CDRH1 is SEQ ID NO: 13106,
[0345] CDRH2 is SEQ ID NO: 13112,
[0346] CDRH3 is SEQ ID NO: 104 or 1821,
[0347] CDRL1 is SEQ ID NO: 13124,
[0348] CDRL2 is SEQ ID NO: 13130, and
[0349] CDRL3 is SEQ ID NO: 88 or 1887.

[0350] In some embodiments, the antibody comprises a light chain variable region (VL) that comprises a light chain complementarity determining region (CDRL)1, CDRL2, and CDRL3 and a heavy chain variable region (VH) that comprises a heavy chain complementarity determining region (CDRH)1, CDRH2, and CDRH3, wherein:
[0351] CDRH1 is SEQ ID NO: 13107,
[0352] CDRH2 is SEQ ID NO: 13113,
[0353] CDRH3 is SEQ ID NO: 110 or 1822,
[0354] CDRL1 is SEQ ID NO: 13125,
[0355] CDRL2 is SEQ ID NO: 13131, and
[0356] CDRL3 is SEQ ID NO: 101 or 1888.

[0357] In some embodiments, the method comprises administering to the subject the antibody disclosed in International Application Publication No. WO2020/206232, which is incorporated herein by reference in its entirety.

[0358] In some embodiments, the subject is co-infected by a pathogen. In some embodiments, the pathogen is a virus or a bacterium. In some embodiments, the virus is selected from the group consisting of a coronavirus (including, but not limited to avian coronavirus (IBV), porcine coronavirus HKU15 (PorCoV HKU15), Porcine epidemic diarrhea virus (PEDV), HCoV-229E, HCoV-OC43, HCoV-HKU1, HCoV-NL63, SARS-CoV, SARS-CoV-2, or MERS-CoV), influenza A, influenza B, HIV, and HCV.

[0359] In some aspects, disclosed herein is a method for treating, reducing, decreasing, inhibiting, and/or preventing an infectious disease in a subject comprising administering to the subject a therapeutically effective amount of any of the antibodies disclosed herein. In some embodiments, the subject is infected by more than one pathogen. In some embodiments, the infectious disease is caused by infection of a virus, such as, for example, an infection with a virus selected from the group consisting of Herpes Simplex virus-1, Herpes Simplex virus-2, Varicella-Zoster virus, Epstein-Barr virus, Cytomegalovirus, Human Herpes virus-6, Variola virus, Vesicular stomatitis virus, Hepatitis A virus, Hepatitis B virus, Hepatitis C virus, Hepatitis D virus, Hepatitis E virus, Rhinovirus, Coronavirus (including, but not limited to avian coronavirus (IBV), porcine coronavirus HKU15 (PorCoV HKU15), Porcine epidemic diarrhea virus (PEDV), HCoV-229E, HCoV-OC43, HCoV-HKU1, HCoV-NL63, SARS-CoV, SARS-CoV-2, or MERS-CoV), Influenza virus A, Influenza virus B, Measles virus, Polyomavirus, Human Papilomavirus, Respiratory syncytial virus, Adenovirus, Coxsackie virus, Dengue virus, Mumps virus, Poliovirus, Rabies virus, Rous sarcoma virus, Reovirus, Yellow fever virus, Zika virus, Ebola virus, Marburg virus, Lassa fever virus, Eastern Equine Encephalitis virus, Japanese Encephalitis virus, St. Louis Encephalitis virus, Murray Valley fever virus, West Nile virus, Rift Valley fever virus, Rotavirus A, Rotavirus B, Rotavirus C, Sindbis virus, Simian Immunodeficiency virus, Human T-cell Leukemia virus type-1, Hantavirus, Rubella virus, Simian Immunodeficiency virus, Human Immunodeficiency virus type-1, and Human Immunodeficiency virus type-2.

[0360] In some embodiments, the infectious disease is caused by a bacterial infection, wherein the bacterial infection is an infection with a bacterium selected from the group consisting of Mycobacterium tuberculosis, Mycobacterium bovis, Mycobacterium bovis strain BCG, BCG substrains, Mycobacterium avium, Mycobacterium intracellular, Mycobacterium africanum, Mycobacterium kansasii, Mycobacterium marinum, Mycobacterium ulcerans, Mycobacterium avium subspecies paratuberculosis, Nocardia asteroides, other Nocardia species, Legionella pneumophila, other Legionella species, Bacillus anthracis, Acetinobacter baumanii, Salmonella typhi, Salmonella enterica, other Salmonella species, Shigella boydii, Shigella dysenteriae, Shigella sonnei, Shigella flexneri, other Shigella species, Yersinia pestis, Pasteurella haemolytica, Pasteurella multocida, other Pasteurella species, Actinobacillus pleuropneumoniae, Listeria monocytogenes, Listeria ivanovii, Brucella abortus, other Brucella species, Cowdria ruminantium, Borrelia burgdorferi, Bordetella avium, Bordetella pertussis, Bordetella bronchiseptica, Bordetella trematum, Bordetella hinzii, Bordetella pteri, Bordetella parapertussis, Bordetella ansorpii other Bordetella species, Burkholderia mallei, Burkholderia psuedomallei, Burkholderia cepacian, Chlamydia pneumoniae, Chlamydia trachomatis, Chlamydia psittaci, Coxiella burnetii, Rickettsial species, Ehrlichia species, Staphylococcus aureus, Staphylococcus epidermidis, Streptococcus pneumoniae, Streptococcus pyogenes, Streptococcus agalactiae, Escherichia coli, Vibrio cholerae, Campylobacter species, Neiserria meningitidis, Neiserria gonorrhea, Pseudomonas aeruginosa, other Pseudomonas species, Haemophilus influenzae, Haemophilus ducreyi, other Hemophilus species, Clostridium tetani, other Clostridium species, Yersinia enterolitica, and other Yersinia species.

[0361] In some embodiments, the method comprises administering to the subject a therapeutically effective amount of a recombinant antibody, wherein the recombinant antibody comprises a light chain variable region (VL) that comprises a light chain complementarity determining region (CDRL)3 and/or a heavy chain variable region (VH) that comprises a heavy chain complementarity determining region (CDRH)3, wherein the CDRL3 comprises an amino acid sequence at least 60% (for example, at least 60%, at least 65%, at least 70%, at least 75%, at least 80%, at least 85%, at least 90%, at least 95%, at least 96%, at least 97%, at least 98%, or at least 99%) identical to CQQSYNVPTF (SEQ ID NO: 1884), and wherein the CDRH3 comprises an amino acid sequence at least 60% (for example, at least 60%, at least 65%, at least 70%, at least 75%, at least 80%, at least 85%, at least 90%, at least 95%, at least 96%, at least 97%, at least 98%, or at least 99%) identical to CAKGLTTESRLEFW (SEQ ID NO: 1818).

[0362] In some embodiments, the CDRL3 comprises an amino acid sequence at least 60% (for example, at least 60%, at least 65%, at least 70%, at least 75%, at least 80%, at least 85%, at least 90%, at least 95%, at least 96%, or at least 97%, at least 98%, at least 99%) identical to

(SEQ ID NO: 1888)
CQVWDSSSEHVVF;
(SEQ ID NO: 1887)
CCLYAGSYSWVF;
(SEQ ID NO: 1883)
CMQPLQLPDTF;
(SEQ ID NO: 1884)
CQQSYNVPTF;
(SEQ ID NO: 1885)
CHQSSSLPFTF;
or
(SEQ ID NO: 1886)
CQHFYSSPPTF

and/or

[0363] the CDRH3 comprises an amino acid sequence at least 60% (for example, at least 60%, at least 65%, at least 70%, at least 75%, at least 80%, at least 85%, at least 90%, at least 95%, at least 96%, at least 97%, at least 98%, or at least 99%) identical to

(SEQ ID NO: 1822)
CARSEKRVTMTRKIKGRWFGPW;
(SEQ ID NO: 1821)
CARVAPPGVVNNKWFDIW;
(SEQ ID NO: 1817)
CAAGLWSGDLSRPRYSDSW;
(SEQ ID NO: 1818)
CAKGLTTESRLEFW;
(SEQ ID NO: 1819)
CVSSWGPESPYYFDYW;
(SEQ ID NO: 1820)
CAREYCTGGDCHFFLDYW;
or
(SEQ ID NO: 101)
QVWDSSSEHVV.

[0364] In some embodiments, the antibody comprises a light chain variable region (VL) that comprises a light chain complementarity determining region (CDRL)1, CDRL2, and CDRL3 and a heavy chain variable region (VH) that comprises a heavy chain complementarity determining region (CDRH)1, CDRH2, and CDRH3, wherein:
[0365] CDRH1 comprises an amino acid sequence at least 60% (for example, at least 60%, at least 65%, at least 70%, at least 75%, at least 80%, at least 85%, at least 90%, at least 95%, at least 96%, at least 97%, at least 98%, or at least 99%) identical to SEQ ID NO: 13102,
[0366] CDRH2 comprises an amino acid sequence at least 60% (for example, at least 60%, at least 65%, at least 70%, at least 75%, at least 80%, at least 85%, at least 90%, at least 95%, at least 96%, at least 97%, at least 98%, or at least 99%) identical to SEQ ID NO: 13108,
[0367] CDRH3 comprises an amino acid sequence at least 60% (for example, at least 60%, at least 65%, at least 70%, at least 75%, at least 80%, at least 85%, at least 90%, at least 95%, at least 96%, at least 97%, at least 98%, or at least 99%) identical to SEQ ID NO: 1817,
[0368] CDRL1 comprises an amino acid sequence at least 60% (for example, at least 60%, at least 65%, at least 70%, at least 75%, at least 80%, at least 85%, at least 90%, at least 95%, at least 96%, at least 97%, at least 98%, or at least 99%) identical to SEQ ID NO: 13120,
[0369] CDRL2 comprises an amino acid sequence at least 60% (for example, at least 60%, at least 65%, at least 70%, at least 75%, at least 80%, at least 85%, at least 90%, at least 95%, at least 96%, at least 97%, at least 98%, or at least 99%) identical to SEQ ID NO: 13126, and/or
[0370] CDRL3 comprises an amino acid sequence at least 60% (for example, at least 60%, at least 65%, at least 70%, at least 75%, at least 80%, at least 85%, at least 90%, at least 95%, at least 96%, at least 97%, at least 98%, or at least 99%) identical to SEQ ID NO: 13 or 1883.

[0371] In some embodiments, the antibody comprises a light chain variable region (VL) that comprises a light chain complementarity determining region (CDRL)1, CDRL2, and CDRL3 and a heavy chain variable region (VH) that comprises a heavy chain complementarity determining region (CDRH)1, CDRH2, and CDRH3, wherein:
[0372] CDRH1 comprises an amino acid sequence at least 60% (for example, at least 60%, at least 65%, at least 70%, at least 75%, at least 80%, at least 85%, at least 90%, at least 95%, at least 96%, at least 97%, at least 98%, or at least 99%) identical to SEQ ID NO: 13103,
[0373] CDRH2 comprises an amino acid sequence at least 60% (for example, at least 60%, at least 65%, at least 70%, at least 75%, at least 80%, at least 85%, at least 90%, at least 95%, at least 96%, at least 97%, at least 98%, or at least 99%) identical to SEQ ID NO: 13109,
[0374] CDRH3 comprises an amino acid sequence at least 60% (for example, at least 60%, at least 65%, at least 70%, at least 75%, at least 80%, at least 85%, at least 90%, at least 95%, at least 96%, at least 97%, at least 98%, or at least 99%) identical to SEQ ID NO: 1818,
[0375] CDRL1 comprises an amino acid sequence at least 60% (for example, at least 60%, at least 65%, at least 70%, at least 75%, at least 80%, at least 85%, or at least 90%, at least 95%, at least 96%, at least 97%, at least 98%, or at least 99%) identical to SEQ ID NO: 13121,
[0376] CDRL2 comprises an amino acid sequence at least 60% (for example, at least 60%, at least 65%, at least 70%, at least 75%, at least 80%, at least 85%, at least 90%, at least 95%, at least 96%, at least 97%, at least 98%, or at least 99%) identical to SEQ ID NO: 13127, and/or
[0377] CDRL3 comprises an amino acid sequence at least 60% (for example, at least 60%, at least 65%, at least 70%, at least 75%, at least 80%, at least 85%, at least 90%, at least 95%, at least 96%, at least 97%, at least 98%, or at least 99%) identical to SEQ ID NO: 25 or 1884.

[0378] In some embodiments, the antibody comprises a light chain variable region (VL) that comprises a light chain complementarity determining region (CDRL)1, CDRL2, and CDRL3 and a heavy chain variable region (VH) that comprises a heavy chain complementarity determining region (CDRH)1, CDRH2, and CDRH3, wherein:
[0379] CDRH1 comprises an amino acid sequence at least 60% (for example, at least 60%, at least 65%, at least 70%, at least 75%, at least 80%, at least 85%, at least 90%, at least 95%, at least 96%, at least 97%, at least 98%, or at least 99%) identical to SEQ ID NO: 13104,
[0380] CDRH2 comprises an amino acid sequence at least 60% (for example, at least 60%, at least 65%, at least 70%, at least 75%, at least 80%, at least 85%, at least 90%, at least 95%, at least 96%, at least 97%, at least 98%, or at least 99%) identical to SEQ ID NO: 13110,
[0381] CDRH3 comprises an amino acid sequence at least 60% (for example, at least 60%, at least 65%, at least 70%, at least 75%, at least 80%, at least 85%, at least 90%, at least 95%, at least 96%, at least 97%, at least 98%, or at least 99%) identical to SEQ ID NO: 1819,
[0382] CDRL1 comprises an amino acid sequence at least 60% (for example, at least 60%, at least 65%, at least 70%, at least 75%, at least 80%, at least 85%, at least 90%, at least 95%, at least 96%, at least 97%, at least 98%, or at least 99%) identical to SEQ ID NO: 13122,
[0383] CDRL2 comprises an amino acid sequence at least 60% (for example, at least 60%, at least 65%, at least 70%, at least 75%, at least 80%, at least 85%, at least 90%, at least 95%, at least 96%, at least 97%, at least 98%, or at least 99%) identical to SEQ ID NO: 13128, and/or
[0384] CDRL3 comprises an amino acid sequence at least 60% (for example, at least 60%, at least 65%, at least 70%, at least 75%, at least 80%, at least 85%, at least 90%, at least 95%, at least 96%, at least 97%, at least 98%, or at least 99%) identical to SEQ ID NO: 39 or 1885.

[0385] In some embodiments, the antibody comprises a light chain variable region (VL) that comprises a light chain complementarity determining region (CDRL)1, CDRL2, and CDRL3 and a heavy chain variable region (VH) that comprises a heavy chain complementarity determining region (CDRH)1, CDRH2, and CDRH3, wherein:
[0386] CDRH1 comprises an amino acid sequence at least 60% (for example, at least 60%, at least 65%, at least 70%, at least 75%, at least 80%, at least 85%, at least 90%, at least 95%, at least 96%, at least 97%, at least 98%, or at least 99%) identical to SEQ ID NO: 13105,
[0387] CDRH2 comprises an amino acid sequence at least 60% (for example, at least 60%, at least 65%, at least 70%, at least 75%, at least 80%, at least 85%, at least 90%, at least 95%, at least 96%, at least 97%, at least 98%, or at least 99%) identical to SEQ ID NO: 13111,
[0388] CDRH3 comprises an amino acid sequence at least 60% (for example, at least 60%, at least 65%, at least 70%, at least 75%, at least 80%, at least 85%, at least 90%, at least 95%, at least 96%, at least 97%, at least 98%, or at least 99%) identical to SEQ ID NO: 1820,
[0389] CDRL1 comprises an amino acid sequence at least 60% (for example, at least 60%, at least 65%, at least 70%, at least 75%, at least 80%, at least 85%, at least 90%, at least 95%, at least 96%, at least 97%, at least 98%, or at least 99%) identical to SEQ ID NO: 13123,
[0390] CDRL2 comprises an amino acid sequence at least 60% (for example, at least 60%, at least 65%, at least 70%, at least 75%, at least 80%, at least 85%, at least 90%, at least 95%, at least 96%, at least 97%, at least 98%, or at least 99%) identical to SEQ ID NO: 13129, and/or
[0391] CDRL3 comprises an amino acid sequence at least 60% (for example, at least 60%, at least 65%, at least 70%, at least 75%, at least 80%, at least 85%, at least 90%, at least 95%, at least 96%, at least 97%, at least 98%, or at least 99%) identical to SEQ ID NO: 49 or 1886.

[0392] In some embodiments, the antibody comprises a light chain variable region (VL) that comprises a light chain complementarity determining region (CDRL)1, CDRL2, and CDRL3 and a heavy chain variable region (VH) that comprises a heavy chain complementarity determining region (CDRH)1, CDRH2, and CDRH3, wherein:
[0393] CDRH1 comprises an amino acid sequence at least 60% (for example, at least 60%, at least 65%, at least 70%, at least 75%, at least 80%, at least 85%, at least 90%, at least 95%, at least 96%, at least 97%, at least 98%, or at least 99%) identical to SEQ ID NO: 13106,
[0394] CDRH2 comprises an amino acid sequence at least 60% (for example, at least 60%, at least 65%, at least 70%, at least 75%, at least 80%, at least 85%, at least 90%, at least 95%, at least 96%, at least 97%, at least 98%, or at least 99%) identical to SEQ ID NO: 13112,
[0395] CDRH3 comprises an amino acid sequence at least 60% (for example, at least 60%, at least 65%, at least 70%, at least 75%, at least 80%, at least 85%, at least 90%, at least 95%, at least 96%, at least 97%, at least 98%, or at least 99%) identical to SEQ ID NO: 104 or 1821,
[0396] CDRL1 comprises an amino acid sequence at least 60% (for example, at least 60%, at least 65%, at least 70%, at least 75%, at least 80%, at least 85%, at least 90%, at least 95%, at least 96%, at least 97%, at least 98%, or at least 99%) identical to SEQ ID NO: 13124,
[0397] CDRL2 comprises an amino acid sequence at least 60% (for example, at least 60%, at least 65%, at least 70%, at least 75%, at least 80%, at least 85%, at least 90%, at least 95%, at least 96%, at least 97%, at least 98%, or at least 99%) identical to SEQ ID NO: 13130, and/or
[0398] CDRL3 comprises an amino acid sequence at least 60% (for example, at least 60%, at least 65%, at least 70%, at least 75%, at least 80%, at least 85%, at least 90%, at least 95%, at least 96%, at least 97%, at least 98%, or at least 99%) identical to SEQ ID NO: 88 or 1887.

[0399] In some embodiments, the antibody comprises a light chain variable region (VL) that comprises a light chain complementarity determining region (CDRL)1, CDRL2, and CDRL3 and a heavy chain variable region (VH) that comprises a heavy chain complementarity determining region (CDRH)1, CDRH2, and CDRH3, wherein:
[0400] CDRH1 comprises an amino acid sequence at least 60% (for example, at least 60%, at least 65%, at least 70%, at least 75%, at least 80%, at least 85%, at least 90%, at least 95%, at least 96%, at least 97%, at least 98%, or at least 99%) identical to SEQ ID NO: 13107,
[0401] CDRH2 comprises an amino acid sequence at least 60% (for example, at least 60%, at least 65%, at least 70%, at least 75%, at least 80%, at least 85%, at least 90%, at least 95%, at least 96%, at least 97%, at least 98%, or at least 99%) identical to SEQ ID NO: 13113,
[0402] CDRH3 comprises an amino acid sequence at least 60% (for example, at least 60%, at least 65%, at least 70%, at least 75%, at least 80%, at least 85%, at least 90%, at least 95%, at least 96%, at least 97%, at least 98%, or at least 99%) identical to SEQ ID NO: 110 or 1822,
[0403] CDRL1 comprises an amino acid sequence at least 60% (for example, at least 60%, at least 65%, at least 70%, at least 75%, at least 80%, at least 85%, at least 90%, at least 95%, at least 96%, at least 97%, at least 98%, or at least 99%) identical to SEQ ID NO: 13125,
[0404] CDRL2 comprises an amino acid sequence at least 60% (for example, at least 60%, at least 65%, at least 70%, at least 75%, at least 80%, at least 85%, at least 90%, at least 95%, at least 96%, at least 97%, at least 98%, or at least 99%) identical to SEQ ID NO: 13131, and/or
[0405] CDRL3 comprises an amino acid sequence at least 60% (for example, at least 60%, at least 65%, at least 70%, at least 75%, at least 80%, at least 85%, at least 90%, at least 95%, at least 96%, at least 97%, at least 98%, or at least 99%) identical to SEQ ID NO: 101 or 1888.

[0406] In some embodiments, the antibody comprises a light chain variable region (VL) that comprises a light chain complementarity determining region (CDRL)1, CDRL2, and CDRL3 and a heavy chain variable region (VH) that comprises a heavy chain complementarity determining region (CDRH)1, CDRH2, and CDRH3, wherein:
[0407] CDRH1 is SEQ ID NO: 13102,
[0408] CDRH2 is SEQ ID NO: 13108,
[0409] CDRH3 is SEQ ID NO: 1817,
[0410] CDRL1 is SEQ ID NO: 13120,
[0411] CDRL2 is SEQ ID NO: 13126, and
[0412] CDRL3 is SEQ ID NO: 13 or 1883.

[0413] In some embodiments, the antibody comprises a light chain variable region (VL) that comprises a light chain complementarity determining region (CDRL)1, CDRL2, and CDRL3 and a heavy chain variable region (VH) that comprises a heavy chain complementarity determining region (CDRH)1, CDRH2, CDRH3, wherein:
[0414] CDRH1 is SEQ ID NO: 13103,
[0415] CDRH2 is SEQ ID NO: 13109,
[0416] CDRH3 is SEQ ID NO: 1818,
[0417] CDRL1 is SEQ ID NO: 13121,
[0418] CDRL2 is SEQ ID NO: 13127, and
[0419] CDRL3 is SEQ ID NO: 25 or 1884.

[0420] In some embodiments, the antibody comprises a light chain variable region (VL) that comprises a light chain complementarity determining region (CDRL)1, CDRL2, and CDRL3 and a heavy chain variable region (VH) that comprises a heavy chain complementarity determining region (CDRH)1, CDRH2, and CDRH3, wherein:
[0421] CDRH1 is SEQ ID NO: 13104,
[0422] CDRH2 is SEQ ID NO: 13110,
[0423] CDRH3 is SEQ ID NO: 1819,
[0424] CDRL1 is SEQ ID NO: 13122,
[0425] CDRL2 is SEQ ID NO: 13128, and
[0426] CDRL3 is SEQ ID NO: 39 or 1885.

[0427] In some embodiments, the antibody comprises a light chain variable region (VL) that comprises a light chain complementarity determining region (CDRL)1, CDRL2, and CDRL3 and a heavy chain variable region (VH) that comprises a heavy chain complementarity determining region (CDRH)1, CDRH2, and CDRH3, wherein:
[0428] CDRH1 is SEQ ID NO: 13105,
[0429] CDRH2 is SEQ ID NO: 13111,
[0430] CDRH3 is SEQ ID NO: 1820,
[0431] CDRL1 is SEQ ID NO: 13123,
[0432] CDRL2 is SEQ ID NO: 13129, and
[0433] CDRL3 is SEQ ID NO: 49 or 1886.

[0434] In some embodiments, the antibody comprises a light chain variable region (VL) that comprises a light chain complementarity determining region (CDRL)1, CDRL2, and CDRL3 and a heavy chain variable region (VH) that comprises a heavy chain complementarity determining region (CDRH)1, CDRH2, and CDRH3, wherein:
[0435] CDRH1 is SEQ ID NO: 13106,
[0436] CDRH2 is SEQ ID NO: 13112,
[0437] CDRH3 is SEQ ID NO: 104 or 1821,
[0438] CDRL1 is SEQ ID NO: 13124,
[0439] CDRL2 is SEQ ID NO: 13130, and
[0440] CDRL3 is SEQ ID NO: 88 or 1887.

[0441] In some embodiments, the antibody comprises a light chain variable region (VL) that comprises a light chain complementarity determining region (CDRL)1, CDRL2, and CDRL3 and a heavy chain variable region (VH) that comprises a heavy chain complementarity determining region (CDRH)1, CDRH2, and CDRH3, wherein:
[0442] CDRH1 is SEQ ID NO: 13107,
[0443] CDRH2 is SEQ ID NO: 13113,
[0444] CDRH3 is SEQ ID NO: 110 or 1822,
[0445] CDRL1 is SEQ ID NO: 13125,
[0446] CDRL2 is SEQ ID NO: 13131, and
[0447] CDRL3 is SEQ ID NO: 101 or 1888.

[0448] In some embodiments, the method comprises administering to the subject the antibody disclosed in International Application Publication No. WO2020/206232, which is incorporated herein by reference in its entirety.

[0449] In some embodiments, the antibody described herein may be in a dosage form. The dosage forms can be adapted for administration by any appropriate route. Appropriate routes include, but are not limited to, oral (including buccal or sublingual), rectal, epidural, intracranial, intraocular, inhaled, intranasal, topical (including buccal, sublingual, or transdermal), vaginal, intraurethral, parenteral, intracranial, subcutaneous, intramuscular, intravenous, intraperitoneal, intradermal, intraosseous, intracardiac, intraarticular, intracavernous, intrathecal, intravitreal, intracerebral, gingival, subgingival, intracerebroventricular, and intradermal. Such formulations may be prepared by any method known in the art.

[0450] As the timing of an infection or onset of a related disease can often not be predicted, it should be understood the disclosed methods of treating, inhibiting, reducing, ameliorating, and/or preventing the disease or disorder described herein can be used prior to or following the onset of the infection or the disease, to treat, prevent, inhibit, and/or reduce the infection or the disease. In one aspect, the disclosed methods can be employed 30, 29, 28, 27, 26, 25, 24, 23, 22, 21, 20, 19, 18, 17, 16, 15, 14, 13, 12, 11, 10, 9, 8, 7, 6, 5, 4, 3, 2 years, 12, 11, 10, 9, 8, 7, 6, 5, 4, 3, 2 months, 30, 29, 28, 27, 26, 25, 24, 23, 22, 21, 20, 19, 18, 17, 16, 15, 14, 13, 12, 11, 10, 9, 8, 7, 6, 5, 4, 3 days, 60, 48, 36, 30, 24, 18, 15, 12, 10, 9, 8, 7, 6, 5, 4, 3, 2 hours, 60, 45, 30, 15, 10, 9, 8, 7, 6, 5, 4, 3, 2, or 1 minute prior to onset of the infection or the disease; or 1, 2, 3, 4, 5, 6, 7, 8, 9, 10, 15, 20, 25, 30, 35, 40, 45, 50, 55, 60, 75, 90, 105, 120 minutes, 3, 4, 5, 6, 7, 8, 9, 10, 11, 12, 15, 18, 24, 30, 36, 48, 60 hours, 3, 4, 5, 6, 7, 8, 9, 10, 11, 12, 13, 14, 15, 16, 17, 18, 19, 20, 21, 22, 23, 24, 25, 26, 27, 28, 29, 30 days, 2, 3, 4, 5, 6, 7, 8, 9, 10, 11, 12 months, 2, 3, 4, 5, 6, 7, 8, 9, 10, 15, 20, 25, 30, 35, 40, 45, 50, 55, 60 or more years after onset of the infection or the disease.

[0451] Dosing frequency for the composition of any preceding aspects, includes, but is not limited to, at least once every year, once every two years, once every three years, once every four years, once every five years, once every six years, once every seven years, once every eight years, once every nine years, once every ten year, at least once every two months, once every three months, once every four months, once every five months, once every six months, once every seven months, once every eight months, once every nine months, once every ten months, once every eleven months, at least once every month, once every three weeks, once every two weeks, once a week, twice a week, three times a week, four times a week, five times a week, six times a week, daily, two times per day, three times per day, four times per day, five times per day, six times per day, eight times per day, nine times per day, ten times per day, eleven times per day, twelve times per day, once every 12 hours, once every 10 hours, once every 8 hours, once every 6 hours, once every 5 hours, once every 4 hours, once every 3 hours, once every 2 hours, once every hour, once every 40 min, once every 30 min, once every 20 min, or once every 10 min. Administration can also be continuous and adjusted to maintaining a level of the compound within any desired and specified range.

### EXAMPLES

[0452] The following examples are set forth below to illustrate the antibodies, methods, and results according to the disclosed subject matter. These examples are not intended to be inclusive of all aspects of the subject matter disclosed herein, but rather to illustrate representative methods and results. These examples are not intended to exclude equivalents and variations of the present invention which are apparent to one skilled in the art.

### Example 1. Introduction

[0453] Human immunodeficiency virus (HIV-1) and hepatitis C virus (HCV) are two of the most diverse human pathogens, ever-evolving to evade immune system pressure, typically establishing chronic, life-long infection. Furthermore, due to the shared routes of transmission, HIV-1/HCV co-infection is relatively common, affecting an estimated 5 million individuals worldwide. Although the last 30+ years have seen significant advances in the treatment of both viruses, there are still no licensed vaccines or other prophylactic countermeasures. Moreover, there is a cure for HCV available, yet less than 50% of infected individuals know of their positive status, highly limiting its utility. Poor medication and diagnostic access, as well as high re-infection rates, for which HIV-1/HCV co-infected individuals experience the highest re-infection rates with either virus, strongly motivate the development of alternative therapeutic and prophylactic tools. Such new tools will be of important utility in the setting of HIV-1/HCV co-infection, where the chronic exposure to two mutating pathogens leads to significantly exacerbated health problems compared to mono-infection.

[0454] Although these highly mutable viruses have rendered classical vaccine design difficult, investigating the human antibody response to HIV-1 and HCV mono-infection has led to the identification of antibodies that are effective in therapy and prophylaxis, and that have served as templates for antibody-specific vaccine development. The clinical setting of HIV-1/HCV co-n infection has been far less explored, with little understanding about antibody responses in the chronic presence of two diverse, constantly evolving, antigen targets. This study investigates the antibody repertoire of a chronically HIV-1/HCV co-infected individual using LIBRA-seq, a technology that enables the simultaneous screening of B cells against a diverse library of antigen targets. This study shows that LIBRA-seq identified antibodies with binding and functional cross-reactivity between HIV-1 and HCV, without exhibiting typical traits of promiscuous antigen recognition. These results challenge the long-standing understanding of the exclusiveness of antibody-antigen specificity and pave the way toward the development of effective therapeutics and vaccines with an unparalleled breadth of reactivity.

### Example 2. Results

[0455] Discovery of HIV-1/HCV Cross-reactive Antibodies from a Chronically HIV-1/HCV Co-infected Donor. To probe the development of antibody responses produced by the unique immunological challenge of HIV-1/HCV co-infection, the antigen-specific B cell compartment was profiled using LIBRA-seq. As previously described, LIBRA-seq is a technology that allows for high-throughput mapping of antigen specificity to B cell receptor sequence by leveraging oligo-barcoded antigens and single-cell sequencing. A donor, VC10014 was identified from the Vanderbilt HIV-1 infection cohort, who had been chronically HIV-1/HCV co-infected for >3 years at the time of sample collection and had never taken anti-viral or anti-retroviral medication. Previous studies investigating key events leading to early development of broad HIV-1 neutralization established that VC10014 developed broad serum neutralization approximately one year after HIV-1 infection and that this phenotype can largely be traced to a CD4 binding site-directed antibody response. Monoclonal antibody discovery efforts in this donor failed to identify any broadly neutralizing antibodies, instead attributing the observed serum breadth to a diverse but cooperative antibody lineages. Given the ability of LIBRA-seq to screen tens of thousands of B cells against a large panel of diverse antigens, including those from unrelated pathogens, it was sought to apply this technology to HIV-1/HCV co-infected donor VC10014. The application of LIBRA-seq provides a unique opportunity to interrogate the antibody repertoire in the setting of chronic exposure to diverse—and constantly evolving—antigens.

[0456] To identify virus-specific B cell sequences from VC10014, LIBRA-seq was applied with a diverse panel of seven antigens including four HIV-1 envelope (Env) glycoprotein antigens each from a unique clade (A/BG505 gp140, B/B41 gp140, C/ConC gp120, AE/A244 gp120), and three HCV envelope glycoprotein antigens from two distinct genotypes (1a/H77 E2c, H77 E1E2, and 2a/JFH1 E2c) (FIG. 6A). The inclusion of multiple antigen variants for each of HIV-1 and HCV allows for the identification of antibodies with broad diversity of antigen specificities. LIBRA-seq recovered paired VH:VL B cell receptor (BCR) sequences with associated antigen specificity mapping for 886 cells (FIGS. 6B, 6C). Of the identified class-switched BCR sequences, ˜75% were HIV-1 antigen-specific, and ˜23% were HCV antigen-specific. Interestingly, a small population of cells positive for at least one HIV-1 and at least one HCV antigen were also identified (FIG. 6C). Within this population of cross-reactive B cells, the class-switched cells with the highest LIBRA-seq scores for any HIV-1 and HCV antigen were assessed (FIG. 1A). The analysis identified five genetically unique sequences with varied levels of somatic hypermutation (SHM) and HIV-1 antigen+/HCV antigen+ specificity phenotypes for further study (FIG. 1B). These five paired heavy-light chain sequences were expressed as recombinant antibodies and their reactivity against a panel of HIV-1 and HCV envelope glycoproteins was confirmed by ELISA (FIGS. 1C-1G). The results confirmed that LIBRA-seq successfully indicated the HIV-1/HCV envelope antigen cross-reactivity of the identified antibodies.

[0457] HIV-1/HCV Cross-reactive Antibodies Recognize Distinct Epitopes on the HIV-1 and HCV Envelope Glycoproteins. Given the unique antibody-antigen cross-reactivity, the epitope of these antibodies on the two antigen targets was mapped. The five cross-reactive antibody epitope targeting on the HCV envelope was defined. All antibodies bound recombinant HCV E1E2 with recognition directed to the E2 subunit of the glycoprotein, with only mAb688 displaying appreciable reactivity with E1 (FIGS. 1F-1G, FIG. 2A). To further map the epitopes targeted, this experiment measured antibody competition with CD81, the cognate HCV entry receptor (FIG. 2C). Binding of four of the five HIV-1/HCV cross-reactive antibodies was inhibited by pre-incubation with CD81-LEL (FIG. 2C). mAb803 binding was slightly increased in the presence of receptor (FIG. 2C).

[0458] Given the extensive glycan shield that decorates both the HIV-1 and HCV envelope glycoproteins, the glycan-dependence of HIV-1/HCV cross-reactive recognition was defined. Only mAb688 was inhibited by both 1M D-(+)-mannose and PNGaseF de-glycosylation (FIG. 2B, FIG. 7A). Additionally, in experiments with HCV E2 protein produced in the presence of kifunensine, a class I α-mannosidase inhibitor that results in the majority presence of high mannose-type glycans, mAb688 binding was decreased, indicating that recognition requires additional contacts or glycan processing (FIG. 7B). In summary, HIV-1/HCV cross-reactive antibodies recognize at least three distinct epitopes on the HCV envelope protein including CD81-independent (mAb803), as well as glycan-dependent (mAb688) and -independent (mAb180, mAb692, mAbKP1-8) CD81-blocking regions.

[0459] Next, the epitopes of these antibodies on the HIV-1 envelope protein were mapped. All five antibodies bound soluble HIV-1 gp140, albeit to various degrees (FIG. 1D). Two of the five antibodies (mAb180, mAb692) recognized the gp41 subunit of HIV-1 Env, while the other three antibodies recognized gp120 (FIG. 2D, FIG. 7C). In competition ELISA experiments it was found that mAb180 and mAb692 recognized epitopes overlapping with that of 5F3 (FIG. 2F). 5F3 has previously been reported to interact with both the C-terminal heptad repeat region (CHR) and the fusion peptide proximal region (FPPR). Importantly, binding of 5F3 or related CHR/FPPR-specific HIV-1 antibodies (167-D, F240) to the HCV envelope protein was not detected, indicating these LIBRA-seq-identified antibodies represent a unique binding modality (FIG. 7D). mAbs 688, 803, and KP1-8 did not compete with the gp41-reactive mAb180 and mAb692 for binding to HIV-1 gp140 (FIG. 2F).

[0460] As with HCV, glycan-dependence of antibody binding to HIV-1 gp140 was investigated. HIV-1 gp140 is a viral protein ornamented with under-processed glycans. Only mAb688 binding to HIV-1 gp140 was inhibited by PNGaseF de-glycosylation and competition with 1M D-(+)-mannose (FIG. 2E, FIG. 7F). Similar to experiments with HCV E1E2, mAb688 recognition of HIV-1 gp140 was significantly decreased after treatment with the class I α-mannosidase inhibitor kifunensine (FIG. 7G). Taken together, these data support the discovery of antibodies recognizing at least three distinct regions on the HIV-1 Env glycoprotein encompassing gp41 (mAb180, 692), and both glycan-dependent (mAb688) and -independent (mAb803, KP1-8) gp120 epitopes.

[0461] HIV-1/HCV Cross-reactive mAbs Show Diverse Neutralization and Fc-mediated Effector Functions. After evaluating HIV-1 and HCV antigen specificity, next experiment assessed the functional abilities of the HIV-1/HCV cross-reactive antibodies in both neutralization and Fc-mediated effector function assays. First, the ability of HIV-1/HCV cross-reactive antibodies to neutralize a panel of representative genotype 1 HCV strains was investigated. Notably, all five HIV-1/HCV cross-reactive antibodies showed exceptional HCV neutralization breadth, neutralizing all 19 genotype 1 viruses tested at 100 μg/mL (FIG. 3A, FIGS. 8A and 8B). This is particularly striking when compared to the previously reported broadly neutralizing antibodies HEPC74 or AR3C, which neutralized 18/19 or 16/19 genotype 1 viruses in this panel, respectively. Further, four of the five HIV-1/HCV cross-reactive antibodies were also able to neutralize both genotype 2b and 3a strains in an infectious cell culture-generated virus (HCV_{CC}) assay (FIG. 3A). Anti-HCV function for these antibodies was measured. Whether the IgG antibodies mAb180, mAb692, and mAb688 can mediate anti-HCV E1E2 Fc effector functions was tested. All tested antibodies (mAb180, mAb692, mAb688) mediated antibody-dependent cellular phagocytosis (ADCP) against HCV E1E2 (genotype 1a; strain H77) (FIGS. 3B, 3C).

[0462] Next, the anti-HIV-1 functions of HIV-1/HCV cross-reactive antibodies was characterized and none of the antibodies showed neutralizing activity against the HIV-1 strains tested (FIG. 8C). However, all tested antibodies (mAb180, mAb692, mAb688) were capable of potentiating antibody-dependent cellular cytotoxicity (ADCC) against infectious HIV-1 envelope (strain CE1086) (FIGS. 3D, 3E). Moreover, all three antibodies mediated antibody-dependent cellular phagocytosis (ADCP) against HIV-1 gp140 (strain BG505) (FIGS. 3F, 3G). Taken together, beyond binding of diverse viral envelope glycoproteins, the identified antibodies revealed extraordinary cross-functionality. The IgA isotype antibodies (mAb803, KP1-8) were not tested in the Fc effector assays against either virus, as this isotype plays a less significant role in serological anti-viral Fc-mediated immunity.

[0463] mAb688 Reveals Exceptionally Broad Anti-Viral Functions. Next assessed whether the LIBRA-seq-identified antibodies were solely HIV-1/HCV cross-reactive, or whether they can recognize additional viral envelope glycoproteins. To that end, these antibodies were tested against a panel of antigens from a diverse set of pathogens, and found that mAb 180, 692, 803, and KP1-8 indeed bound only the HIV-1 and HCV antigens tested (FIG. 4A). By contrast, mAb688 recognized a broad diversity of other viral antigens including glycoproteins from Influenza A, alphacoronaviruses NL63 and 229E, and betacoronaviruses MERS-CoV, SARS-CoV, and notably, SARS-CoV-2 (FIG. 4A). As observed with HIV-1 and HCV, it was found that mAb688 recognition of both influenza A hemagglutinin and SARS-CoV-2 spike was mannose-dependent (FIGS. 4B, 4C). Previous studies indicated that the anti-HIV-1 antibody 2G12 is also able to bind the SARS-CoV-2 spike, by recognition of a high mannose glycan structure on asparagine 709. Comparatively, mAb688 binding to SARS-CoV-2 spike was not inhibited by N709A mutation (FIG. 9A). mAb688 was unable to neutralize SARS-CoV-2 but showed ADCP activity against the SARS-CoV-2 spike protein (FIG. 4D, FIG. 9B). Similarly, mAb688 was unable to neutralize influenza virus but showed ADCP against the influenza A hemagglutinin protein (FIG. 4E, FIGS. 9C-9E). Together with the mAb688 HIV-1 and HCV functional activity, these data indicate that mAb688 is capable of diverse functions against a broad range of viral targets.

[0464] Finally, to determine whether the observed broad functional abilities of mAb688 spanned beyond virus targets, whether mAb688 can inhibit the most common etiological agent of urinary tract infection (UTI), Uropathogenic Escherichia coli (UPEC), was investigated. UPEC potentiates infection using fimbriae to recognize mannosylated bladder host cell surface glycoprotein and red blood cells. As this interaction between bacteria and host is free mannose-inhibitable, whether mAb688 recognition of host mannose can block function was tested. Importantly, neither mAb688 nor the isotype control were able to impede UPEC adherence or hemagglutination (FIGS. 9F, to 9G), indicating that mAb688 recognizes a mannose structure that can be specific to viral glycosylation and/or requires additional antigen interactions.

[0465] Finally, to define specific glycan architecture that mediates broad mAb688 recognition, this study tested binding to a glycan microarray consisting of >580 distinct structures developed by the Center for Functional Glycomics (CFG, v5.4 microarray). The majority of observed glycan hits contained a terminal N-acetyl glucosamine with (31-6 linkage with mannose or galactose, suggesting this is critical for mAb688 binding (FIG. 10). Further, these data demonstrate mAb688 preferentially recognizes immature, hybrid-type glycans, a form of glycosylation that's enriched on viral glycoproteins (FIG. 10).

[0466] Diverse polyreactivity profiles of HIV-1/HCV cross-reactive mAbs. To investigate whether the cross-reactive antibodies can achieve diverse binding phenotypes via antigen polyreactivity, or non-specific interactions, reactivity to a panel of nuclear self-antigens was measured using the Luminex AtheNA Multi-analyte ANA assay (FIG. 11A). Similar to previously described gp41 antibodies, autoreactivity was observed for both mAb180 and mAb692. Further, mAb180, but not the other antibodies, bound non-infected, whole (un-permeabilized) HEp-2 cells in a fluorescent assay (FIGS. 11B, 11C). Therefore, from the set of five cross-reactive antibodies, only mAb180 and mAb692 showed binding in polyreactivity assays, indicating that the broadly reactive anti-viral phenotype of the other antibodies—including the exceptionally broad mAb688—cannot be explained by promiscuous, non-specific, antigen interactions.

[0467] Somatic hypermutation establishes and enhances cross-reactivity. The effect of affinity maturation on the development of HIV-1/HCV cross-reactivity was interrogated. High affinity HIV-1-specific antibody responses often require the accumulation of mutations through multiple rounds of somatic hypermutation over the course of chronic infection. Binding of germline-reverted IgG antibody mutants to both HIV-1 and HCV envelope proteins was therefore assessed (FIGS. 12A and 12B, FIG. 13A). These mutants lack all acquired mutations but bear the CDR3 sequences of the mature antibody. When somatic mutations were removed from mAb688, this antibody was no longer capable of recognizing either HIV-1 or HCV (FIG. 13A). By contrast, when mAb180 and mAb692 were germline-reverted, they retained binding to HCV envelope protein, and demonstrated distinct HIV-1 envelope reactivities (FIGS. 12A and 12B). Together, these data indicate that affinity maturation is essential for both establishing and developing HIV-1/HCV cross-reactive antibody binding.

[0468] Finally, to trace the early development of HIV-1/HCV cross-reactivity, this study performed deep, unpaired BCR sequencing of donor VC10014 approximately 0.59 years post co-infection (˜3 years before the sample used for LIBRA-seq). This dataset identified multiple heavy and light chain sequences clonally related to both mAb180 and mAb692. The effect of these early acquired mutations on HIV-1/HCV antigen cross-reactivity was then defined, by expressing pairwise combinations of heavy and light chain sequences as recombinant antibodies (FIGS. 12C, 12D). Overall, distinct binding patterns were observed when various mutation-containing heavy and light chain sequences were combined (FIGS. 12C and 12D). Notably, HCV envelope recognition by both mAb180 and mAb692 was significantly more tolerant of variable somatic hypermutation than HIV-1 envelope recognition (FIGS. 12C and 12D). Together, these results indicate that different acquired-mutations or regions of the mAb180 and mAb692 paratope are essential for recognition of HCV vs. HIV-1 envelope glycoprotein.

[0469] Although antibodies are generally utilized for their incredible specificity, flexibility in the antigen binding site can provide a unique advantage in the fight against highly mutable pathogens such as HIV-1 and HCV. This is exemplified by the discovery of broadly reactive or broadly neutralizing antibodies (bNAbs) and their documented utility as prophylactic therapeutics and vaccine design scaffolds. In this study, the concept of broadly reactive antibodies is expanded by discovering the first HIV-1/HCV cross-functional antibodies. Using the LIBRA-seq technology, five genetically unique, class-switched, paired heavy-light chain sequences were identified that are positive for at least one HIV-1 and one HCV envelope glycoprotein, and then confirmed this unique antigen cross-reactivity by expression as recombinant human antibodies. All five antibodies were capable of potentiating anti-HIV-1 and anti-HCV functions. Moreover, it was found that when native antibody isotype (either IgG3-mAb688 or IgA-mAb803/mAbKP1-8) was switched to IgG1, antibody binding was reduced or ablated (FIG. 13), indicating that antigen recognition by these antibodies can be influenced by factors outside of direct antibody-epitope interactions. Further, it was discovered that somatic hypermutation aided in the development of HIV-1/HCV cross-reactivity, and mapping studies indicate that differential mutations enhance recognition of each viral antigen.

[0470] Previous studies have noted roles for poly- and auto-reactive antibodies in immune responses against highly diverse viruses, most notably observing common cross-reactivity between HIV-1 gp41-specific antibodies with host and microbiome antigens. However, these antibodies are often IgM, non-functional, or difficult to elicit by vaccination due to immune tolerance mechanisms. Notably, three of the five antibodies described in this study did not show evidence for polyreactivity. While the other two, mAb180 and mAb692, showed reactivity with host antigens, they nevertheless exhibited anti-viral functions against both HIV-1 and HCV, indicating such antibodies can still contribute to cross-viral clearance. In addition, all five antibodies regardless of autoreactivity showed exceptional HCV neutralization, inhibiting infection with 19/19 genotype 1 strains. Further, all five antibodies displayed exceptional HCV neutralization breadth, with four of the five antibodies capable of neutralizing viral strains from HCV genotypes 1-3. This is particularly striking as genotypes 1-3 account for >95% of all HCV infections in the United States. Beyond neutralization, these antibodies may still impede or reduce infection by Fc-mediated effector functions or by targeting glycan structures outside the receptor binding site to prevent viral interaction with host cell lectin receptors (DC-SIGN and L-SIGN both interact with HIV-1 and HCV).

[0471] Recent reports have outlined a class of glycan-reactive antibodies capable of recognizing, and in particular cases potentiate effector functions against, HIV-1, coronavirus, and influenza antigens, similar to the exceptionally broad antibody mAb688 isolated in the studies. Although some antibodies in this category displayed promiscuous polyreactivity against arbitrary unrelated antigens, w autoreactive binding for mAb688 was not observed. Glycan-reactive antibodies that avoid self-recognition represent a general immune defense mechanism for effectively counteracting viral infections. In addition to this glycan-reactive “class” of cross-reactive antibodies, the discovery of multiple HIV-1/HCV cross-reactive antibodies targeting diverse epitope determinants shows that there are multiple mechanisms that result in antibody cross-reactivity against unrelated antigens. These findings provide unexpected insights into the dynamic and flexible nature of the human antibody response. In the face of highly mutable threats, antibodies that can tolerate sequence variability, without triggering auto- or poly-reactivity, provide a selective advantage. Such antibodies can aid cross-reactive vaccine design or serve as therapeutics themselves for both HIV-1 and HCV, as well as emerging threats such as SARS-CoV-2 and other infectious diseases.

### Example 3. Materials and Methods

[0472] Donor information. Donor VC10014 was identified and enrolled in the Vanderbilt cohort (VC) and samples isolated after informed consent. VC10014 was recruited with CD4+ T-cell counts of >250/μl without antiretroviral therapy and with no AIDS-defining illness during the period of observation. The sample used for this study was collected on Mar. 21, 2006, >3 years post onset of co-infection.

[0473] Purification of antigens. Plasmids encoding the following genes were transfected in FreeStyle293F (Thermo Fisher Scientific) cells via polyethyleneimine transfection; HIV-1/BG505.664.SOSIP, B41.664.SOSIP, ConC gp120, A244 gp120, HCV/H77 E1E2, H77 E2c, JFH-1 E2c. All antigens contained an AviTag sequence for subsequent biotinylation. Antigens were purified by Galanthus nivalis (GNA, Snowdrop) lectin affinity chromatography (Vector Labs), and further purified by gel filtration with Superdex200 Increase column (Cytiva). Fractions corresponding to correctly folded protein were collected and biotinylated using BirA (Avidity). Biotinylated HIV-1 antigens were fluorescently labeled by incubation with Streptavidin-AF568 (Invitrogen), and biotinylated HCV antigens fluorescently labeled by incubation with Streptavidin-AF647 (Invitrogen).

[0474] The following reagents were obtained through the NIH HIV Reagent Program, Division of AIDS, NIAID, NIH: Human Immunodeficiency Virus Type 1 MN gp41 Protein, Recombinant from Escherichia coli, ARP-12027, contributed by DAIDS/NIAID; produced by ImmunoDX, LLC; Human Immunodeficiency Virus 1 (HIV-1) gp120 Recombinant Protein (B.9021 D11gp120), ARP-12571, contributed by Drs. Barton F. Haynes and Hua-Xin Liao. The following antigens were acquired from Sino Biological: Hepatitis C virus Envelope Glycoprotein E1/HCV-E1 (subtype 1b, strain HC-J4) Protein (His Tag); Human coronavirus (HCoV-229E) Spike Protein (S1+S2 ECD, His Tag); Human coronavirus (HCoV-NL63) Spike Protein (S1+S2 ECD, His Tag); SARS-CoV-2 (2019-nCoV) Spike S1+S2 ECD-His Recombinant Protein; SARS-CoV Spike S1+S2 ECD-His Recombinant Protein; Human coronavirus HKU1 (isolate N5) (HCoV-HKU1) Spike Protein (S1+S2 ECD, His Tag); MERS-CoV Spike Protein (S1+S2 ECD, aa 1-1297, His Tag). The following reagent was obtained through BEI Resources, NIAID, NIH: H1 Hemagglutinin (HA) Protein with C-Terminal Histidine Tag from Influenza Virus, A/New Caledonia/20/1999 (H1N1), Recombinant from Baculovirus, NR-48873; F Protein with C-Terminal Histidine Tag from Respiratory Syncytial Virus, B1, Recombinant from Baculovirus, NR-31097.

[0475] DNA-barcoding of antigens. The study used oligos that possess 15 bp antigen barcode, a sequence capable of annealing to the template switch oligo that is part of the 10× bead-delivered oligos and contain truncated TruSeq small RNA read 1 sequences in the following structure: 5′-CCTTGGCACCCGAGAATTCCANNNNNNNNNNNNNCCCATATAAGA*A*A-3′ (SEQ ID NO: 13156), where Ns represent the antigen barcode (Integrated DNA Technologies), and, and * represents a phosphorothioate bond. For each antigen, a unique DNA barcode was directly conjugated to the antigen itself. In particular, 5′amino-oligonucleotides were conjugated directly to each antigen using the Solulink Protein-Oligonucleotide Conjugation Kit (Vector Labs) according to manufacturer's instructions. Briefly, the oligo and protein were desalted, and then the amino-oligo was modified with the 4FB crosslinker, and the biotinylated antigen protein was modified with S-HyNic. Then, the 4FB-oligo and the HyNic-antigen were mixed together. This causes a stable bond to form between the protein and the oligonucleotide. The concentration of the antigen-oligo conjugates was determined by a BCA assay (Pierce), and the HyNic molar substitution ratio of the antigen-oligo conjugates was analyzed using the NanoDrop according to the Solulink protocol guidelines. AKTA FPLC (Cytiva) was used to remove excess oligonucleotide from the protein-oligo conjugates, which were also verified using SDS-PAGE with a silver stain (Pierce). Antigen-oligo conjugates were also used in flow cytometry titration experiments.

[0476] Antigen-specific B cell sorting. Antigen-specific B cells were sorted from donor PBMCs by fluorescence-activated cell sorting. Briefly, frozen cells were quickly thawed at 37° C., and washed 3× with DPBS without Ca2+ or Mg+ (Gibco) supplemented with 1% BSA (Sigma) (DPBS-BSA) before counting. Cells were resuspended in DPBS-BSA and stained with antibodies against cell markers including viability dye (Ghost Red 780) (Tonbo Biosciences), CD14-APC-Cy7 (BD Biosciences), IgM-APC-Cy7 (BD Biosciences), CD3-FITC (BD Biosciences), CD19-BV711 (BD Biosciences), and IgG-PE-Cy5 (BD Biosciences). Additionally, fluorescently-labeled antigen-oligo conjugates were added to the stain. After staining in the dark for 20 minutes at room temperature, cells were washed three times with DPBS-BSA. Live, CD14−, IgM−, CD3−, CD19+, Antigen+ cells were sorted using a FACSAria III flow sorter ((BD Biosciences) and to the Vanderbilt Technologies for Advanced Genomics (VANTAGE) sequencing core at an appropriate target concentration for 10× Genomics library preparation and subsequent sequencing.

[0477] Sample preparation, library preparation, and sequencing. Single-cell suspensions were loaded onto the Chromium Controller microfluidics device (10× Genomics) and processed using the B-cell Single Cell V(D)J solution according to manufacturer's indications for a target capture of 10,000 B cells per ⅛ 10× cassette, with minor modifications in order to intercept, amplify and purify the antigen barcode libraries as previously described.

[0478] Sequence processing and bioinformatic analysis. A modified version of the previously described pipeline was used. It used paired-end FASTQ files of oligo libraries as input, process and annotate reads for cell barcode, UMI, and antigen barcode, and generate a cell barcode—antigen barcode UMI count matrix. BCR contigs were processed using Cell Ranger (10× Genomics) using GRCh38 as reference. Antigen barcode libraries were also processed using Cell Ranger (10× Genomics). The overlapping cell barcodes between the two libraries were used as the basis of the subsequent analysis. Cell barcodes that had only non-functional heavy chain sequences as well as cells with multiple functional heavy chain sequences and/or multiple functional light chain sequences were removed, reasoning that these can be multiplets. Additionally, the BCR contigs (filtered_contigs.fasta file output by Cell Ranger, 10× Genomics) were aligned to IMGT reference genes using HighV-Quest38. The output of HighV-Quest was parsed using ChangeO and merged with an antigen barcode UMI count matrix. Finally, the LIBRA-seq score for each antigen in the library for every cell was determined as previously described.

[0479] Antibody purification. For each antibody, variable genes were inserted into custom plasmids encoding the native (IgG1, IgG3, or IgA2) constant region for the heavy chain as well as respective lambda or kappa light chains (pTwist CMV BetaGlobin WPRE Neo vector, Twist Bioscience). Antibodies were expressed in Expi293F mammalian cells (Thermo Fisher Scientific) by co-transfecting heavy chain and light chain expressing plasmids using polyethylenimine transfection reagent. Antibodies were purified from filtered cell supernatant by Protein A affinity chromatography, and stored in PBS, pH=7.4 unless otherwise noted. The following reagents were obtained through the NIH HIV Reagent Program, Division of AIDS, NIAID, NIH: Anti-Human Immunodeficiency Virus (HIV)-1 gp41 Monoclonal Antibody (2F5), ARP-1475, contributed by DAIDS/NIAID; Monoclonal Anti-Human Immunodeficiency Virus (HIV)-1 gp120 Protein (VRC01), ARP-12033, contributed by Dr. John Mascola; Anti-Human Immunodeficiency Virus 1 (HIV-1) gp41 Monoclonal (5F3), ARP-6882, contributed by Polymun Scientific.

[0480] ELISA. To assess antibody binding, soluble protein was plated on Immulon 2HB plates (Thermo Fisher Scientific) at 2 μg/ml overnight at 4° C. In cases where capture ELISA was used, plates were pre-incubated for 2 hours at room temperature (RT) with 5 μg/ml GNA lectin (Sigma) or 2 μg/ml anti-AviTag (Genscript) and washed 3× with PBS+0.05% Tween-20 (PBS-T) before antigen plating overnight. Between each of the subsequent incubation steps, plates were washed 3× with PBS-T. Non-specific binding was blocked by incubation with 5% fetal bovine serum (FBS) (Gibco) diluted in PBS-T for 1 hour at RT. Primary monoclonal antibodies were diluted in 5% FBS-PBST starting at 20 μg/ml with a serial 1:5 dilution (unless otherwise specified) and then added to the plate for 1 hour at RT. Secondary antibody, either goat anti-human IgG (Southern Biotech) or goat anti-human IgA (Invitrogen), was diluted 1:10,000 in 5% FBS diluted in PBS-T and added for 1 hour at RT. Reaction was developed by 10 minute incubation with One Step Ultra-TMB (Thermo Fisher Scientific) and stopped with 1N sulfuric acid. Plate absorbances were read at 450 nm (Biotek). Data are represented as mean±SEM for one ELISA experiment performed in duplicate. ELISA experiments were repeated with at least 2 different antibody preparation aliquots. The area under the curve (AUC) was calculated using GraphPad Prism 8.0.0.

[0481] Competition ELISA. Competition ELISA experiments were performed as above with minor modifications. After coating with antigen and blocking, non-biotinylated competitor antibody was added to each well at 10 μg/ml and incubated at RT for 1 hour. After washing, biotinylated antibody (final concentration of 1 μg/ml) was added and incubated for 1 hour at RT. After washing three times with PBS-T, streptavidin-HRP (Thermo Fisher Scientific) was added at 1:10,000 dilution in 5% FBS in PBS-T and incubated for 1 hour at room temperature. Plates were washed and substrate and sulfuric acid were added as described above.

[0482] Mannose-competition ELISA. Mannose competition ELISAs were performed as described above with minor modifications. After antigen coating and washing, nonspecific binding was blocked by incubation with 5% FBS diluted in PBS for 1 hour at RT. Primary antibodies were diluted in 5% FBS-PBST+/−1M D-(+)-Mannose (Sigma) starting at 10 μg/ml with a serial 1:5 dilution and then added to the plate for 1 hour at RT. After washing, antibody binding was detected with goat anti-human IgG-HRP (Southern Biotech) and added at 1:10,000 dilution in 5% FBS in PBS-T to the plates. After 1 hour incubation, plates were washed and substrate and sulfuric acid were added as described above. Data shown is representative of experiments performed in duplicate with at least 2 different antibody preparations.

[0483] HCV epitope knockout mutant binding screen. E2 mutant screening ELISAs were performed as described above with a few modifications. Plasmids encoding the gene for JFH-1 E2 containing the following mutations, as well as wild type, were transfected in Expi293F (Thermo Fisher Scientific) cells via polyethyleneimine transfection (Epitope I:L413G, N415A, N417A, W420A, N423A; Epitope II: F437A, N448A; Domain B: G523A, T526A, Y527A, W529A, N532G, T534A, D535A; Domain C: N540A, N576A; Domain D: W616A, R639A, N645A). After 4 days of expression, transfections were spun down and filtered. Immulon 2HB (Thermo Fisher Scientific) ELISA plates were pre-incubated with 2 μg/ml mouse anti-AviTag (Genscript) for 2 hours at RT, and washed 3× with PBS-T, before being coated with the above filtered cell supernatants overnight at 4 C. After antigen coating, ELISAs were performed as described above.

[0484] Negative stain grid preparation. For screening and imaging of negatively stained (NS) HIV-1 gp140 in complex with Fab 180/692, ˜3 μl of the complex after SEC at concentrations of 10 to 15 μl g/ml were applied to glow-discharged grid with continuous carbon film on 400 square mesh copper EM grids (Electron Microscopy Sciences). The grids were stained with 0.75% Uranyl formate (UF).

[0485] Screening, data collection, and image processing. NS grids were screened on an FEI Morgagni (Thermo Fisher Scientific) microscope operating at 100 kV with AMT 1 k×1 k CCD camera to verify sample and grid quality. Data collection from NS grids were done on FEI TF20 (Thermo Fisher Scientific) operate at 200 kV with US4000 4 k×4 k CCD camera (Gatan) and controlled by SerialEM. The data set was collected at nominal mag of 50K× with A/pix of 2.18 with defocus range of 1.4-1.8 and a total dose of ˜30.0 e/A2.

[0486] Image processing was performed using the CryoSPARC software package. The data set was imported, CTF estimated, and particles were picked. The particles were extracted with box size of 256×256 pixels and 2D classification was performed to generated clean homogeneous classes.

[0487] TZM-bl HIV-1 neutralization. Antibody neutralization was assessed using the TZM-bl assay. This standardized assay measures antibody-mediated inhibition of infection of JC53BL-13 cells (also known as TZM-bl cells) by molecularly cloned Env-pseudoviruses. Viruses that are highly sensitive to neutralization (Tier 1) and/or those representing circulating strains that are moderately sensitive (Tier 2) were included, plus additional viruses, including a subset of the antigens used for LIBRA-seq. Murine leukemia virus (MLV) was included as an HIV-specificity control and VRC01 was used as a positive control. Results are presented as the concentration of monoclonal antibody (in μg/ml) required to inhibit 50% of virus infection (IC₅₀).

[0488] Antibody-dependent cellular phagocytosis (ADCP), and antibody-dependent cellular cytotoxicity (ADCC). The THP-1 phagocytosis assay was performed as previously described using 1 μM neutravidin beads (Molecular Probes Inc) coated with antigen. Monoclonal IgG samples were titrated and tested at a final concentration of 100 μg/ml. Additionally monoclonal antibodies were tested starting at 100 μg/ml with 5-fold dilutions. Phagocytic scores were calculated as the geometric mean fluorescent intensity (MFI) of the beads that have been taken up multiplied by the percentage bead uptake. This, as well as all other flow cytometry work was completed on a FACSAria II (BD Biosciences). Pooled IgG from HIV-positive donors from the NIH AIDS Reagent programme (HIVIG) was used in all assays to normalize for plate to plate variation while samples from 10 Clade C-infected individuals was used as a positive control for all assays. Palivizumab (MedImmune) was used as negative control.

[0489] HCV pseudoparticle (HCV_{PP}) neutralization. A panel of 19 HCVpps were produced by lipofectamine-mediated transfection of HCV E1E2 plasmid, pNL4-3.Luc.R-E-plasmid containing the env-defective HIV proviral genome (NIH AIDS Reagent Program), and pAdVantage (Promega) into HEK293T cells. Mock pseudoparticles, generated with pNL4-3.Luc.R-E- and pAdVantage and without E1E2 plasmid, were used as a negative control for each transfection. For HCVpp testing, 8,000 Hep3B cells per well were plated in 96-well solid white flat bottom polystyrene TC-treated microplates (Corning) and incubated overnight at 37° C. For infectivity testing, HCVpp were incubated on Hep3B target cells for 5 hours. Following this incubation, medium was changed to 100 μL of phenol-free Hep3B media and incubated for 72 hours at 37° C. Infectivity was quantified using a luciferase assay as described below. All HCVpp used in neutralization assays produced RLU values at least 10-fold above background entry by mock pseudoparticles. For antibody breadth testing, HCVpp were incubated for 1 hour with mAb at 100 μg/mL and then added in duplicate to Hep3B target cells for 5 hours. Following this incubation, medium was changed to 100 μL of phenol-free Hep3B media and incubated for 72 hours at 37° C. Infectivity was quantified using a luciferase assay as described below. All HCVpp used in neutralization assays produced RLU values at least 10-fold above background entry by mock pseudoparticles. For antibody potency testing, antibodies were serially diluted five-fold, starting at a concentration of 100 μg/mL and ending at 2.56×10⁻⁴ (leaving the last well as PBS only), and incubated with HCVpp for one hour at 37° C. before the addition to HEP3B target cells in duplicate. Following this incubation, medium was changed to 100 μL of phenol-free Hep3B media and incubated for 72 hours at 37° C. After incubation (for either breadth or potency testing), media was removed from the cells, 45 μL of 1× cell culture lysis reagent (Promega) was added to each well and left to incubate for 5 minutes. The luciferase assay was measured in relative light units (RLUs) in Berthold Luminometer (Berthold Technologies Centro LB960). The percentage of neutralization for the antibody breadth was calculated as [1−(RLU_{mAb}/RLU_{IgG})]×100]. The percentage of neutralization for the dilution curves and was calculated as [1-(RLU_{mAb}/RLU_{PBS})]×100. HEPC74 and Human IgG were run as controls.

[0490] Influenza A hemagglutination inhibition (HAI). The hemagglutination inhibition (HAI) assay was used to assess the ability of mAb688 to inhibit agglutination of erythrocytes. The HAI assay was performed similarly to previously described protocols adapted from the World Health Organization (WHO) laboratory influenza surveillance manual. In brief, mAb688 (expressed as IgG1 or IgG3) was diluted in a series of 2-fold serial dilutions in v-bottom microtiter plates (Greiner Bio-One) starting from 20 μg/ml. An equal volume of A/Brisbane/02/2018 (CA/09 pdm-like H1N1) or A/Hong Kong/4801/2014 (H3N2) virus, adjusted to ˜8 hemagglutination units per 50 was added to each well. The plates were covered and incubated at room temperature for 20 min, and then a 0.8% solution of turkey (for H1N1) or guinea pig (for H3N2) erythrocytes (Lampire Biologicals) in PBS was added. Erythrocytes were stored at 4° C. and used within 72 h of preparation. The plates were mixed by agitation and covered, and the erythrocytes were settled for 30 min at room temperature. The HAI titer was determined by the reciprocal dilution of the last well that contained nonagglutinated erythrocytes. Positive and negative controls were included for each plate.

[0491] Focus reduction assay. Madin-Darby canine kidney (MDCK) cells stably-transfected with cDNA encoding human 2,6-sialtransferase (SIAT1) MDCK-SIAT1 (provided by Center for Disease Control and Prevention) were maintained in DMEM (Corning) supplemented with penicillin-streptomycin, BSA fraction V 7.5% solution (Thermo Fisher Scientific), 25 mM HEPES buffer, 10% heat-inactivated FBS and 1 mg/ml of geneticin (G418 sulfate; Thermo Fisher Scientific).

[0492] The focus reduction assay (FRA) was performed similarly to previously described protocols. In brief, MDCK-SIAT1 cells were seeded at a density of 2.5-3×10⁵ cells/ml in a 96-well plate (Greiner Bio-One) the day before the assay was run. The following day, the cell monolayers were rinsed with 0.01 M PBS (pH 7.2) (Thermo Fisher Scientific), followed by the addition of 2-fold serially diluted mAb688 (expressed as IgG1 or IgG3) at 50 μl per well starting with 20 μg/ml dilution in virus growth medium, termed VGM-T (DMEM containing 0.1% BSA, penicillin-streptomycin, and 1 m/ml L-(tosylamido-2-phenyl) ethyl chloromethyl ketone (TPCK)-treated trypsin [Sigma, St. Louis, Mo., USA]). Afterwards, 50 μl of virus (A/California/07/2009 [pdm H1N1], A/Texas/50/2012 [H3N2] or B/Massachusetts/02/2012 [influenza B virus]) standardized to 1.2×10⁴ focus forming units (FFU) per milliliter, and corresponding to 600 FFU per 50 was added to each well, including control wells. Following a 2 h incubation period at 37° C. with 5% CO₂, the cells in each well were then overlaid with 100 μl of equal volumes of 1.2% Avicel RC/CL (Type RC581 NF; FMC Health and Nutrition, Philadelphia, Pa.) in 2×MEM (Thermo Fisher Scientific) containing 1 μg/ml TPCK-treated trypsin, 0.1% BSA, and antibiotics. Plates were incubated for 18-22 h at 37° C., 5% CO₂. The overlays were then removed from each well and the monolayer was washed once with PBS to remove any residual Avicel. The plates were fixed with ice-cold 4% formalin in PBS for 30 min at 4° C., followed by a PBS wash and permeabilization using 0.5% Triton X-100 in PBS/glycine at room temperature for 20 min. Plates were washed three times with PBS supplemented with 0.1% Tween 20 (PBST) and incubated for 1 h with a mAb against influenza A nucleoprotein (provided by the International Reagent Resource (IRR), Influenza Division, WHO Collaborating Center for Surveillance, Epidemiology and Control of Influenza, Centers for Disease Control and Prevention) in ELISA buffer (PBS containing 10% horse serum and 0.1% Tween 80 [Thermo Fisher Scientific]). Following washing three time with PBST, the cells were incubated with goat anti-mouse peroxidase-labeled IgG (SeraCare) in ELISA buffer for 1 h at room temperature. Plates were washed three times with PBST, and infectious foci (spots) were visualized using TrueBlue substrate (SeraCare) containing 0.03% H₂O₂ incubated at room temperature for 10-15 min. The reaction was stopped by washing five times with distilled water. Plates were dried and foci were enumerated using an ImmunoSpot S6 ULTIMATE reader with ImmunoSpot 7.0.28.5 software (Cellular Technology Limited). The FRA titer was reported as the reciprocal of the highest dilution of serum corresponding to 50% foci reduction compared with the virus control minus the cell control.

[0493] SARS-CoV-2 pseudoparticle neutralization. To assess neutralizing activity against SARS-CoV-2 strain 2019 n-CoV/USA WA1/2020 (obtained from the Centers for Disease Control and Prevention, a gift from N. Thornburg), the high-throughput RTCA assay and xCelligence RTCA HT Analyzer (ACEA Biosciences) was used as described previously. After obtaining a background reading of a 384-well E-plate, 6,000 Vero-furin cells were seeded per well. Sensograms were visualized using RTCA HT software version 1.0.1 (ACEA Biosciences). One day later, equal volumes of virus were added to antibody samples and incubated for 1 ch at 37° C. in 5% CO₂. mAbs were tested in triplicate with a single (1:20) dilution. Virus-mAb mixtures were then added to Vero-furin cells in 384-well E-plates. Controls were included that had Vero-furin cells with virus only (no mAb) and media only (no virus or mAb). E-plates were read every 8-12 h for 72 h to monitor virus neutralization. At 32 h after virus-mAb mixtures were added to the E-plates, cell index values of antibody samples were compared to those of virus only and media only to determine presence of neutralization.

[0494] Uropathogenic E. coli hemagglutination and adherence inhibition. Hemagglutination assays were performed as described previously. Bacterial cultures were grown statically at 37° C. for 24 hours in Lysogeny broth (LB), subcultured intro fresh LB, and grown another 24 hours. Cultures were normalized to optical density (600 nm) of 1.0 in PBS, concentrated 10×, and resuspended in PBS or PBS containing 4% mannose (to competitively inhibit the type 1 pili), 20 μg/mL mAb688, or 20 μg/mL isotype control. Bacteria were added to a 96 well plate and diluted in two-fold increments. Next, guinea pig erythrocytes (Innovative Research, Inc.) were washed and suspended in PBS or PBS containing 4% mannose, 20 μg/mL mAb688, or 20 μg/mL isotype control. Erythrocytes were added to the diluted bacterial culture and incubated statically overnight at 4° C. Hemagglutination titer was determined by measuring the lowest dilution that visibly inhibited hemagglutination. Data are representative of three biological replicates performed in technical duplicate.

[0495] Autoreactivity. Monoclonal antibody reactivity to nine autoantigens (SSA/Ro, SS-B/La, Sm, ribonucleoprotein (RNP), Scl 70, Jo-1, dsDNA, centromere B, and histone) was measured using the AtheNA Multi-Lyte® ANA-II Plus test kit (Zeus scientific, Inc.). Antibodies were incubated with AtheNA beads for 30 min at concentrations of 50, 25, 12.5 and 6.25 μg/mL. Beads were washed, incubated with secondary and read on the Luminex platform as specified in the kit protocol. Data were analyzed using AtheNA software. Positive (+) specimens received a score >120, and negative (−) specimens received a score <100. Samples between 100-120 were considered indeterminate

[0496] HEp-2 cell binding. Antibody binding to whole (un-permeabilized) un-infected HEp-2 cells was measured by flow cytometry. Briefly, HEp-2 cells were collected and washed 3× with DPBS-BSA before counting. ˜1 million cells/condition were stained with a final concentration of 100 μg/ml, 10 μg/ml, or 1 μg/ml antibody diluted in DPBS-BSA for 20 minutes at 4° C. Cells were then washed 3× with DPBS-BSA and stained with either goat anti-human IgG labeled with PE (Southern Biotech) or goat anti-human IgA (Southern Biotech) labeled with PE diluted 1:1000 in DPBS-BSA for 20 minutes at 4 C. Cells were washed a final time and fluorescence acquired on a 4-Laser Fortessa (BD Biosciences). FCS files were analyzed and figures generated using CytoBank. Data shown is representative of at least 2 separate experiments with different antibody preparations. The following reagent was obtained through the NIH HIV Reagent Program, Division of AIDS, NIAID, NIH: Anti-Human Immunodeficiency Virus (HIV)-1 gp41 Monoclonal Antibody (4E10), ARP-10091, contributed by DAIDS/NIAID.

TABLE 1
LIBRA-seq Identifies Multiple Unique HIV/HCV
Cross-reactive Antibodies.
Sequences in Table:
CARSEKRVTMTRKIKGRWFGPW (SEQ ID NO: 1822);
CARVAPPGVVNNKWFDIW (SEQ ID NO: 1821);
CAAGLWSGDLSRPRYSDSW (SEQ ID NO: 1817);
CAKGLTTESRLEFW (SEQ ID NO: 1818);
CVSSWGPESPYYFDYW (SEQ ID NO: 1819);
CAREYCTGGDCHFFLDYW (SEQ ID NO: 1820);
CQVWDSSSEHVVF (SEQ ID NO: 1888);
CCLYAGSYSWVF (SEQ ID NO: 1887);
CMQPLQLPDTF (SEQ ID NO: 1883);
CQQSYNVPTF (SEQ ID NO: 1884);
CHQSSSLPFTF (SEQ ID NO: 1885);
CQHFYSSPPTF(SEQ ID NO: 1886).

| mAb | IGHV | IGHJ | % | CDR | IGLV | IGLJ | % | CDR |
|---|---|---|---|---|---|---|---|---|
| name | gene | gene | SHM | 3 | gene | gene | SHV | 3 |
| mAb180 | IGHV3- | IGHJ5 | 0.8877 | CARS | IGLV3- | IGLJ2 | 0.9283 | CQVW |
| | 48 | | | EKRV | 21 | | | DSSS |
| | | | | TMTR | | | | EHVV |
| | | | | KIKG | | | | F |
| | | | | RWFG | | | | |
| | | | | PW | | | | |
| mAb692 | IGHV1- | IGHJS | 0.9132 | CARV | IGLV2- | IGLJ3 | 0.9028 | CCLY |
| | 46 | | | APPG | 11 | | | AGSY |
| | | | | WNNK | | | | SWVF |
| | | | | SVFE | | | | |
| | | | | MW | | | | |
| mAb504 | IGHV3- | 1GHJ4 | 0.8741 | CAAG | IGKV2- | IGKJ4 | 0.9558 | CMQP |
| | 15 | | | LWSG | 28 | | | LQLP |
| | | | | DLSR | | | | DTF |
| | | | | PRYS | | | | |
| | | | | DSW | | | | |
| mAb688 | IGHV3- | IGHJ5 | 0.875 | CAKG | IGKV1- | IGKJ1 | 0.8674 | CQQS |
| | 23 | | | LTTE | 39 | | | YNVP |
| | | | | SRLE | | | | TF |
| | | | | FW | | | | |
| mAb803 | IGHV3- | IGHJ4 | 0.9514 | CVSS | IGKV6- | IGKJ3 | 0.9642 | CHQS |
| | 21 | | | WGPE | 21 | | | SSLP |
| | | | | SPYY | | | | FTF |
| | | | | FDYW | | | | |
| mAbKP1- | IGHV1- | IGHJ4 | 0.9028 | CARE | IGKV4- | IGKJ3 | 0.9327 | CQH |
| 8 | 8 | | | YCTG | 1 | | | FYSS |
| | | | | GDCH | | | | PPTF |
| | | | | FFLD | | | | |
| | | | | YW | | | | |

TABLE 2
Additional sequences

| | |
|---|---|
| SEQ ID NO: 1871 | TTGGCTTCT |
| SEQ ID NO: 1872 | GCTGCGTCC |
| SEQ ID NO: 1873 | TATGCTTCC |
| SEQ ID NO: 1874 | TGGGCATCT |
| SEQ ID NO: 1875 | GATGTCAAT |
| SEQ ID NO: 1876 | GATGATACC |
| SEQ ID NO: 4335 | GGGGAA |
| SEQ ID NO: 10982 | TTTGGCCA |
| SEQ ID NO: 11188 | AGACTC |
| SEQ ID NO: 11197 | AGCCTCAGA |
| SEQ ID NO: 11523 | GGTGCATCC |
| SEQ ID NO: 11524 | AAGGCGTCT |
| SEQ ID NO: 11525 | GAGGTCAGT |
| SEQ ID NO: 11526 | GGTGTTACC |
| SEQ ID NO: 11527 | GATACAAGC |
| SEQ ID NO: 11528 | GAAGACAGT |
| SEQ ID NO: 11529 | GGTTCATCT |
| SEQ ID NO: 11530 | AAGACGTCT |
| SEQ ID NO: 11531 | TGGGCATCT |
| SEQ ID NO: 11532 | AAAGACAAC |
| SEQ ID NO: 11533 | GATGCTTCC |
| SEQ ID NO: 11534 | GATGTCAGT |
| SEQ ID NO: 11535 | TGGGCTTCT |
| SEQ ID NO: 11536 | GGTAACAGG |
| SEQ ID NO: 11537 | GAGGTCAAT |
| SEQ ID NO: 11538 | GGTGAAAAC |
| SEQ ID NO: 11539 | GCAGATAAC |
| SEQ ID NO: 11540 | TGGGCATCG |
| SEQ ID NO: 11541 | TATGCTTCC |
| SEQ ID NO: 11542 | GGTATATCC |
| SEQ ID NO: 11543 | AGTGCATCC |
| SEQ ID NO: 11544 | GGTGCATCG |
| SEQ ID NO: 11545 | GATGATAGC |
| SEQ ID NO: 11546 | GGTAACAAT |
| SEQ ID NO: 11547 | GCTGCAGTC |
| SEQ ID NO: 11548 | GAGGGCAGT |
| SEQ ID NO: 11549 | GAAGTTTCC |
| SEQ ID NO: 11550 | GCTGCATCC |
| SEQ ID NO: 11551 | AAAGACGAT |
| SEQ ID NO: 11552 | AGGAATAAT |
| SEQ ID NO: 11553 | GAGGTCACT |
| SEQ ID NO: 11555 | GTTGCATCC |
| SEQ ID NO: 11556 | AAGGTTTCT |
| SEQ ID NO: 11557 | GGTATCACC |
| SEQ ID NO: 11558 | GATGCATCC |
| SEQ ID NO: 11560 | GGTAACAGC |
| SEQ ID NO: 11561 | GGTGTATCC |
| SEQ ID NO: 11562 | CGTGCATCC |
| SEQ ID NO: 11563 | GATACATCC |
| SEQ ID NO: 11564 | GTTACATCC |
| SEQ ID NO: 11565 | GCTGAATCC |
| SEQ ID NO: 11566 | GCTGCGTCC |
| SEQ ID NO: 11567 | GCTGCATAC |
| SEQ ID NO: 11568 | GATGCAACC |
| SEQ ID NO: 11569 | GGTGCCTCC |
| SEQ ID NO: 11570 | GACGCTTCC |
| SEQ ID NO: 11571 | GATGCGTCC |
| SEQ ID NO: 11572 | GATGTATCC |
| SEQ ID NO: 11573 | AAAGACACT |
| SEQ ID NO: 11574 | GATGACAGT |
| SEQ ID NO: 11575 | GATGTCACT |
| SEQ ID NO: 11576 | GGTGCATAC |
| SEQ ID NO: 11577 | GGTAAAAAC |
| SEQ ID NO: 11578 | CGGAATAAT |
| SEQ ID NO: 11579 | ACGCTTTCC |
| SEQ ID NO: 11580 | GGTGCCTCT |
| SEQ ID NO: 11581 | AAGGACACT |
| SEQ ID NO: 11582 | GAGGATAAC |
| SEQ ID NO: 11583 | AGTGCATCC |
| SEQ ID NO: 11584 | GGGAACGAC |
| SEQ ID NO: 11585 | GGTGCGTCC |
| SEQ ID NO: 11586 | AAAGACAGT |
| SEQ ID NO: 11587 | AATGACAGC |
| SEQ ID NO: 11588 | TCTGCATCC |
| SEQ ID NO: 11589 | AGGGCGTCT |
| SEQ ID NO: 11590 | TCTGATAAT |
| SEQ ID NO: 11591 | CAAGACAGT |
| SEQ ID NO: 11592 | CAGGCGTCT |
| SEQ ID NO: 11593 | GGCAACAAC |
| SEQ ID NO: 11594 | TTAACTTCT |
| SEQ ID NO: 11595 | GGTATTTCC |
| SEQ ID NO: 11596 | AAGGCATCT |
| SEQ ID NO: 11597 | CAAGATACC |
| SEQ ID NO: 11598 | GGTACATCC |
| SEQ ID NO: 11599 | TGGGCGTCT |
| SEQ ID NO: 11600 | GAGGTTTTT |
| SEQ ID NO: 11601 | AGCAATGAT |
| SEQ ID NO: 11602 | GCCGCCTCC |
| SEQ ID NO: 11603 | AGCACAAAC |
| SEQ ID NO: 11604 | AGGGCATCT |
| SEQ ID NO: 11605 | GGTGCTTCC |
| SEQ ID NO: 11606 | CATGCTTCC |
| SEQ ID NO: 11607 | GATGCATTC |
| SEQ ID NO: 11608 | AAGATTTCT |
| SEQ ID NO: 11609 | TCTACTTCC |
| SEQ ID NO: 11610 | GCCGCATCC |
| SEQ ID NO: 11611 | TTGGGATCT |
| SEQ ID NO: 11612 | GCTGCATTC |
| SEQ ID NO: 11613 | GATAAAGAC |
| SEQ ID NO: 11614 | AGGACTAAT |
| SEQ ID NO: 11615 | AGGGATTCT |
| SEQ ID NO: 11616 | AATGTCAGT |
| SEQ ID NO: 11618 | TCTACATCC |
| SEQ ID NO: 11619 | GATGCCTCC |
| SEQ ID NO: 11620 | GAGGATTAC |
| SEQ ID NO: 11621 | CAAGATAGC |
| SEQ ID NO: 11622 | CAGGCATCT |
| SEQ ID NO: 11623 | CATGATAGC |
| SEQ ID NO: 11624 | AATAATAAT |
| SEQ ID NO: 11625 | ACTGGAACC |
| SEQ ID NO: 11626 | GGAAGATAC |
| SEQ ID NO: 11627 | AATAAGGAC |
| SEQ ID NO: 11628 | GGTGCATCT |
| SEQ ID NO: 11629 | GGTAACATC |
| SEQ ID NO: 11630 | GATGATACC |
| SEQ ID NO: 11631 | CAGTCATCT |
| SEQ ID NO: 11632 | GGCAATAAC |
| SEQ ID NO: 11633 | GACAGTAAT |
| SEQ ID NO: 11634 | GGTGTGTCC |
| SEQ ID NO: 11635 | GAGGCGTCT |
| SEQ ID NO: 11636 | GAAGTCAGT |
| SEQ ID NO: 11638 | GGAGCGTCA |
| SEQ ID NO: 11639 | GGGGCCTCT |
| SEQ ID NO: 11640 | GATACAACT |
| SEQ ID NO: 11641 | GCTAACAGC |
| SEQ ID NO: 11642 | ATGGTTTCT |
| SEQ ID NO: 11643 | GACGTCATT |
| SEQ ID NO: 11644 | GATGTCAAT |
| SEQ ID NO: 11645 | GATGCTTCT |
| SEQ ID NO: 11646 | GAGGACAAC |
| SEQ ID NO: 11647 | AAAGACAGA |
| SEQ ID NO: 11648 | GCGGGCAGT |
| SEQ ID NO: 11649 | CAAGATACT |
| SEQ ID NO: 11650 | GGTAATAAT |
| SEQ ID NO: 11651 | GAAGTCAAT |
| SEQ ID NO: 11652 | GATGTCATT |
| SEQ ID NO: 11653 | AAGGCAGTT |
| SEQ ID NO: 11654 | AGCACAGAC |
| SEQ ID NO: 11655 | GAGGTTTCT |
| SEQ ID NO: 11656 | AACACAAGC |
| SEQ ID NO: 11657 | TTGGGTTCT |
| SEQ ID NO: 11658 | GCTACATCC |
| SEQ ID NO: 11659 | AGGGTTTCT |
| SEQ ID NO: 11660 | GATGACAGC |
| SEQ ID NO: 11661 | GAGGATACA |
| SEQ ID NO: 11662 | AAGGCCTCT |
| SEQ ID NO: 11663 | GGTGGGTCA |
| SEQ ID NO: 11664 | GGTGATAGC |
| SEQ ID NO: 11665 | GAGACTAAC |
| SEQ ID NO: 11667 | AGGAATGAT |
| SEQ ID NO: 11668 | GCTTCATCC |
| SEQ ID NO: 11669 | GACAATAAT |
| SEQ ID NO: 11670 | GCTGCCTCC |
| SEQ ID NO: 11671 | TGGGCCTCT |
| SEQ ID NO: 11672 | GAAGATACC |
| SEQ ID NO: 11673 | GATAGTTAT |
| SEQ ID NO: 11674 | GCTAAAAAC |
| SEQ ID NO: 11675 | AAGACATCT |
| SEQ ID NO: 11676 | AAGGCGTCC |
| SEQ ID NO: 11677 | ATGGCGTCT |
| SEQ ID NO: 11678 | GAAGCCTCC |
| SEQ ID NO: 11679 | AAAGACAAT |
| SEQ ID NO: 11680 | GGTAACCGC |
| SEQ ID NO: 11681 | GATGAATCC |
| SEQ ID NO: 11682 | GGTGAATCC |
| SEQ ID NO: 11683 | GACAATAGT |
| SEQ ID NO: 11684 | CAAGATAGT |
| SEQ ID NO: 11685 | GCTACATTC |
| SEQ ID NO: 11686 | CAAGATTCC |
| SEQ ID NO: 11687 | GAGGCATCC |
| SEQ ID NO: 11688 | AGCACACAC |
| SEQ ID NO: 11689 | GATGCAAAC |
| SEQ ID NO: 11690 | TGGTCATCT |
| SEQ ID NO: 11691 | GAGGTCAGG |
| SEQ ID NO: 11692 | GCTGCTTCC |
| SEQ ID NO: 11693 | TCTACATCT |
| SEQ ID NO: 11694 | GACGTCAAT |
| SEQ ID NO: 11695 | GATGATAGT |
| SEQ ID NO: 11696 | GATGCCTCT |
| SEQ ID NO: 11697 | GAAAATAAT |
| SEQ ID NO: 11698 | TTGGCTTCT |
| SEQ ID NO: 11699 | CAGGATTCT |
| SEQ ID NO: 11700 | GATACTTCC |
| SEQ ID NO: 11701 | GATGCTTTC |
| SEQ ID NO: 11702 | AGAATTTCT |
| SEQ ID NO: 11703 | AGTCATATT |
| SEQ ID NO: 11704 | AAGGCGTCA |
| SEQ ID NO: 11705 | GCCGTCAGT |
| SEQ ID NO: 11706 | GGTGCAACC |
| SEQ ID NO: 11707 | GAAGTCGTT |
| SEQ ID NO: 11708 | CATGCGTCT |
| SEQ ID NO: 11709 | AGTGACAGT |
| SEQ ID NO: 11710 | GGTATCTCC |
| SEQ ID NO: 11711 | AGTGCCTCC |
| SEQ ID NO: 11712 | GGGACTTCC |
| SEQ ID NO: 11713 | GATGATGAC |
| SEQ ID NO: 11714 | GACAACAAT |
| SEQ ID NO: 11715 | GACACTACT |
| SEQ ID NO: 11716 | AATGATAAT |
| SEQ ID NO: 11717 | GATGGATCC |
| SEQ ID NO: 11718 | GAAGTCTAT |
| SEQ ID NO: 11719 | GGGGCATCG |
| SEQ ID NO: 11720 | GACAATGAT |
| SEQ ID NO: 11721 | GATGCATCA |
| SEQ ID NO: 11722 | GAGGTTTCC |
| SEQ ID NO: 11723 | ACTAATAAT |
| SEQ ID NO: 11724 | GAAGTTACT |
| SEQ ID NO: 11725 | TCTGCTTCC |
| SEQ ID NO: 11726 | GCTGCATCG |
| SEQ ID NO: 11727 | GGGGTCACT |
| SEQ ID NO: 11728 | GGTAACAAC |
| SEQ ID NO: 11729 | GGTAAAAGG |
| SEQ ID NO: 11730 | ATGATTTCT |
| SEQ ID NO: 11731 | GCTGCAAGT |
| SEQ ID NO: 11733 | AGTAATGAT |
| SEQ ID NO: 11734 | GATGATCGG |
| SEQ ID NO: 11735 | TCTGCCTCC |
| SEQ ID NO: 11736 | TCGGTTTCT |
| SEQ ID NO: 11737 | GCTGCATTT |
| SEQ ID NO: 11738 | CTCCGTTCT |
| SEQ ID NO: 11739 | GATGTGTCC |
| SEQ ID NO: 11741 | GAAGCATCT |
| SEQ ID NO: 11742 | AGTACAAGC |
| SEQ ID NO: 11743 | GATGACAAA |
| SEQ ID NO: 11744 | GAGGGCACT |
| SEQ ID NO: 11745 | AGTACTGAT |
| SEQ ID NO: 11746 | GAAAGTTAT |
| SEQ ID NO: 11747 | GGTAACACC |
| SEQ ID NO: 11748 | AGAACATCC |
| SEQ ID NO: 11749 | CTTAACTCC |
| SEQ ID NO: 11750 | GCTGGTTAT |
| SEQ ID NO: 11751 | GATTCATCC |
| SEQ ID NO: 11752 | CAGGTTTTT |
| SEQ ID NO: 11753 | GGAGCAACC |
| SEQ ID NO: 11754 | AGCGATAAC |
| SEQ ID NO: 11755 | GATGATCGG |
| SEQ ID NO: 11756 | CTTAACAGC |
| SEQ ID NO: 11757 | AGTAGTAAT |
| SEQ ID NO: 11758 | GAGGTCCGT |
| SEQ ID NO: 11759 | GAAGTCCAT |
| SEQ ID NO: 11760 | AAAGACAAA |
| SEQ ID NO: 11761 | GCTGTATCC |
| SEQ ID NO: 11762 | GAGAATAAT |
| SEQ ID NO: 11763 | GCAGCATCC |
| SEQ ID NO: 11764 | GCGGGCAGA |
| SEQ ID NO: 11765 | GATGATAAA |
| SEQ ID NO: 11766 | GGTGTCTCC |
| SEQ ID NO: 13126 | LAS |
| SEQ ID NO: 13127 | AAS |
| SEQ ID NO: 13128 | YAS |
| SEQ ID NO: 13129 | WAS |
| SEQ ID NO: 13130 | DVN |
| SEQ ID NO: 13131 | DDT |

### Sequences

[0497] A large number of sequences were analyzed throughout this application. Additional sequences reviewed and analyzed include:

[0498] SEQ ID NOs: 1905-2627 which are “Barcode” sequences;

[0499] SEQ ID NOs: 2628-3258 which are “SEQUENCE VDJ.H” sequences;

[0500] SEQ ID NOs: 3259-3880 which are “JUNCTION.H” sequences;

[0501] SEQ ID NOs: 7771-8518 which are “SEQUENCE VDJ.L” sequences;

[0502] SEQ ID NOs: 8520-9189 which are “JUNCTION.L” sequences.

[0503] Unless defined otherwise, all technical and scientific terms used herein have the same meanings as commonly understood by one of skill in the art to which the disclosed invention belongs. Publications cited herein and the materials for which they are cited are specifically incorporated by reference.

[0504] Those skilled in the art will appreciate that numerous changes and modifications can be made to the preferred embodiments of the invention and that such changes and modifications can be made without departing from the spirit of the invention. It is, therefore, intended that the appended claims cover all such equivalent variations as fall within the true spirit and scope of the invention.

The application's sequence listing, which the Patent Office published only in electronic form, follows.

SEQUENCE LISTING (13156 sequences)

SEQ ID NO: 1 - protein, 9 aa, synthetic construct
  REGION 1..9: note = Synthetic construct
MQALQHPHT

SEQ ID NO: 2 - protein, 9 aa, synthetic construct
  REGION 1..9: note = Synthetic construct
MQALQIPIT

SEQ ID NO: 3 - protein, 9 aa, synthetic construct
  REGION 1..9: note = Synthetic construct
MQALQIPPT

SEQ ID NO: 4 - protein, 9 aa, synthetic construct
  REGION 1..9: note = Synthetic construct
MQALQIPYT

SEQ ID NO: 5 - protein, 9 aa, synthetic construct
  REGION 1..9: note = Synthetic construct
MQALQSPHT

SEQ ID NO: 6 - protein, 9 aa, synthetic construct
  REGION 1..9: note = Synthetic construct
MQALQSPPT

SEQ ID NO: 7 - protein, 9 aa, synthetic construct
  REGION 1..9: note = Synthetic construct
MQALQSPYT

SEQ ID NO: 8 - protein, 9 aa, synthetic construct
  REGION 1..9: note = Synthetic construct
MQALQVPPT

SEQ ID NO: 9 - protein, 9 aa, synthetic construct
  REGION 1..9: note = Synthetic construct
MQDLQTPLT

SEQ ID NO: 10 - protein, 9 aa, synthetic construct
  REGION 1..9: note = Synthetic construct
MQGLQAPLT

SEQ ID NO: 11 - protein, 9 aa, synthetic construct
  REGION 1..9: note = Synthetic construct
MQGLQIPYT

SEQ ID NO: 12 - protein, 9 aa, synthetic construct
  REGION 1..9: note = Synthetic construct
MQGLQTPLT

SEQ ID NO: 13 - protein, 9 aa, synthetic construct
  REGION 1..9: note = Synthetic construct
MQPLQLPDT

SEQ ID NO: 14 - protein, 9 aa, synthetic construct
  REGION 1..9: note = Synthetic construct
MQPLQPPLT

SEQ ID NO: 15 - protein, 9 aa, synthetic construct
  REGION 1..9: note = Synthetic construct
MQPLQTPLT

SEQ ID NO: 16 - protein, 9 aa, synthetic construct
  REGION 1..9: note = Synthetic construct
MQSLQAPLT

SEQ ID NO: 17 - protein, 9 aa, synthetic construct
  REGION 1..9: note = Synthetic construct
MQTLQLPLT

SEQ ID NO: 18 - protein, 9 aa, synthetic construct
  REGION 1..9: note = Synthetic construct
MQTLQLPRT

SEQ ID NO: 19 - protein, 9 aa, synthetic construct
  REGION 1..9: note = Synthetic construct
MQVLQTPLT

SEQ ID NO: 20 - protein, 9 aa, synthetic construct
  REGION 1..9: note = Synthetic construct
MQYLQTPLT

SEQ ID NO: 21 - protein, 8 aa, synthetic construct
  REGION 1..8: note = Synthetic construct
QQSYIAPT

SEQ ID NO: 22 - protein, 8 aa, synthetic construct
  REGION 1..8: note = Synthetic construct
QQSYIGQT

SEQ ID NO: 23 - protein, 8 aa, synthetic construct
  REGION 1..8: note = Synthetic construct
QQSYNAPT

SEQ ID NO: 24 - protein, 8 aa, synthetic construct
  REGION 1..8: note = Synthetic construct
QQSYNTPT

SEQ ID NO: 25 - protein, 8 aa, synthetic construct
  REGION 1..8: note = Synthetic construct
QQSYNVPT

SEQ ID NO: 26 - protein, 8 aa, synthetic construct
  REGION 1..8: note = Synthetic construct
QQSYPPPT

SEQ ID NO: 27 - protein, 8 aa, synthetic construct
  REGION 1..8: note = Synthetic construct
QQSYRTPT

SEQ ID NO: 28 - protein, 8 aa, synthetic construct
  REGION 1..8: note = Synthetic construct
QQSYRTVT

SEQ ID NO: 29 - protein, 8 aa, synthetic construct
  REGION 1..8: note = Synthetic construct
QQSYTTPT

SEQ ID NO: 30 - protein, 8 aa, synthetic construct
  REGION 1..8: note = Synthetic construct
QQSYTTRT

SEQ ID NO: 31 - protein, 8 aa, synthetic construct
  REGION 1..8: note = Synthetic construct
QQSYTTWT

SEQ ID NO: 32 - protein, 8 aa, synthetic construct
  REGION 1..8: note = Synthetic construct
QQSYYTPT

SEQ ID NO: 33 - protein, 9 aa, synthetic construct
  REGION 1..9: note = Synthetic construct
HQSRSLPFT

SEQ ID NO: 34 - protein, 9 aa, synthetic construct
  REGION 1..9: note = Synthetic construct
HQSSSFLFT

SEQ ID NO: 35 - protein, 9 aa, synthetic construct
  REGION 1..9: note = Synthetic construct
HQSSSFSFT

SEQ ID NO: 36 - protein, 9 aa, synthetic construct
  REGION 1..9: note = Synthetic construct
HQSSSLGGT

SEQ ID NO: 37 - protein, 9 aa, synthetic construct
  REGION 1..9: note = Synthetic construct
HQSSSLLFT

SEQ ID NO: 38 - protein, 9 aa, synthetic construct
  REGION 1..9: note = Synthetic construct
HQSSSLPFA

SEQ ID NO: 39 - protein, 9 aa, synthetic construct
  REGION 1..9: note = Synthetic construct
HQSSSLPFT

SEQ ID NO: 40 - protein, 9 aa, synthetic construct
  REGION 1..9: note = Synthetic construct
HQSSSLPHT

SEQ ID NO: 41 - protein, 9 aa, synthetic construct
  REGION 1..9: note = Synthetic construct
HQSSSLPQT

SEQ ID NO: 42 - protein, 9 aa, synthetic construct
  REGION 1..9: note = Synthetic construct
HQSSSLPWT

SEQ ID NO: 43 - protein, 9 aa, synthetic construct
  REGION 1..9: note = Synthetic construct
HQSSSLPYT

SEQ ID NO: 44 - protein, 9 aa, synthetic construct
  REGION 1..9: note = Synthetic construct
HQSSSLQFT

SEQ ID NO: 45 - protein, 9 aa, synthetic construct
  REGION 1..9: note = Synthetic construct
HQTSSLPFT

SEQ ID NO: 46 - protein, 9 aa, synthetic construct
  REGION 1..9: note = Synthetic construct
QHFYSDPPT

SEQ ID NO: 47 - protein, 9 aa, synthetic construct
  REGION 1..9: note = Synthetic construct
QHFYSKPPT

SEQ ID NO: 48 - protein, 9 aa, synthetic construct
  REGION 1..9: note = Synthetic construct
QHFYSNPPT

SEQ ID NO: 49 - protein, 9 aa, synthetic construct
  REGION 1..9: note = Synthetic construct
QHFYSSPPT

SEQ ID NO: 50 - protein, 9 aa, synthetic construct
  REGION 1..9: note = Synthetic construct
QHFYTNPPT

SEQ ID NO: 51 - protein, 9 aa, synthetic construct
  REGION 1..9: note = Synthetic construct
QHLYSNPPT

SEQ ID NO: 52 - protein, 9 aa, synthetic construct
  REGION 1..9: note = Synthetic construct
KQPLQHPYT

SEQ ID NO: 53 - protein, 9 aa, synthetic construct
  REGION 1..9: note = Synthetic construct
MPPLQTPYT

SEQ ID NO: 54 - protein, 9 aa, synthetic construct
  REGION 1..9: note = Synthetic construct
MQFLQHPYT

SEQ ID NO: 55 - protein, 9 aa, synthetic construct
  REGION 1..9: note = Synthetic construct
MQPLQIPGT

SEQ ID NO: 56 - protein, 9 aa, synthetic construct
  REGION 1..9: note = Synthetic construct
MQPLQIPTT

SEQ ID NO: 57 - protein, 9 aa, synthetic construct
  REGION 1..9: note = Synthetic construct
MQPLQPPLT

SEQ ID NO: 58 - protein, 9 aa, synthetic construct
  REGION 1..9: note = Synthetic construct
MQPLQRPCT

SEQ ID NO: 59 - protein, 9 aa, synthetic construct
  REGION 1..9: note = Synthetic construct
MQPLQTPGT

SEQ ID NO: 60 - protein, 9 aa, synthetic construct
  REGION 1..9: note = Synthetic construct
MQPLQTPHT

SEQ ID NO: 61 - protein, 9 aa, synthetic construct
  REGION 1..9: note = Synthetic construct
MQPLQTPKT

SEQ ID NO: 62 - protein, 9 aa, synthetic construct
  REGION 1..9: note = Synthetic construct
MQPLQTPRT

SEQ ID NO: 63 - protein, 9 aa, synthetic construct
  REGION 1..9: note = Synthetic construct
MQPLQTPYT

SEQ ID NO: 64 - protein, 9 aa, synthetic construct
  REGION 1..9: note = Synthetic construct
MQPLQVPQT

SEQ ID NO: 65 - protein, 8 aa, synthetic construct
  REGION 1..8: note = Synthetic construct
QQSYGTAT

SEQ ID NO: 66 - protein, 8 aa, synthetic construct
  REGION 1..8: note = Synthetic construct
QQSYIAPT

SEQ ID NO: 67 - protein, 8 aa, synthetic construct
  REGION 1..8: note = Synthetic construct
QQSYITRT

SEQ ID NO: 68 - protein, 8 aa, synthetic construct
  REGION 1..8: note = Synthetic construct
QQSYNAGT

SEQ ID NO: 69 - protein, 8 aa, synthetic construct
  REGION 1..8: note = Synthetic construct
QQSYNTLT

SEQ ID NO: 70 - protein, 8 aa, synthetic construct
  REGION 1..8: note = Synthetic construct
QQSYRTLT

SEQ ID NO: 71 - protein, 8 aa, synthetic construct
  REGION 1..8: note = Synthetic construct
QQSYSTLT

SEQ ID NO: 72 - protein, 8 aa, synthetic construct
  REGION 1..8: note = Synthetic construct
QQSYTTLT

SEQ ID NO: 73 - protein, 8 aa, synthetic construct
  REGION 1..8: note = Synthetic construct
QQSYTTRT

SEQ ID NO: 74 - protein, 9 aa, synthetic construct
  REGION 1..9: note = Synthetic construct
HQSASLPQA

SEQ ID NO: 75 - protein, 9 aa, synthetic construct
  REGION 1..9: note = Synthetic construct
HQSGSLPFT

SEQ ID NO: 76 - protein, 9 aa, synthetic construct
  REGION 1..9: note = Synthetic construct
HQSKSLPLA

SEQ ID NO: 77 - protein, 9 aa, synthetic construct
  REGION 1..9: note = Synthetic construct
HQSRSLPFT

SEQ ID NO: 78 - protein, 9 aa, synthetic construct
  REGION 1..9: note = Synthetic construct
HQSSSLPFA

SEQ ID NO: 79 - protein, 9 aa, synthetic construct
  REGION 1..9: note = Synthetic construct
HQSSSLPQA

SEQ ID NO: 80 - protein, 9 aa, synthetic construct
  REGION 1..9: note = Synthetic construct
HQSSSLPYP

SEQ ID NO: 81 - protein, 9 aa, synthetic construct
  REGION 1..9: note = Synthetic construct
HQSSSLPYS

SEQ ID NO: 82 - protein, 9 aa, synthetic construct
  REGION 1..9: note = Synthetic construct
HQSTSLPYS

SEQ ID NO: 83 - protein, 9 aa, synthetic construct
  REGION 1..9: note = Synthetic construct
HQSYSLPFA

SEQ ID NO: 84 - protein, 9 aa, synthetic construct
  REGION 1..9: note = Synthetic construct
QHFYSDPPT

SEQ ID NO: 85 - protein, 9 aa, synthetic construct
  REGION 1..9: note = Synthetic construct
QHFYSKPPT

SEQ ID NO: 86 - protein, 9 aa, synthetic construct
  REGION 1..9: note = Synthetic construct
QHFYSNPPT

SEQ ID NO: 87 - protein, 9 aa, synthetic construct
  REGION 1..9: note = Synthetic construct
QHFYTNPPT

SEQ ID NO: 88 - protein, 10 aa, synthetic construct
  REGION 1..10: note = Synthetic construct
CLYAGSYSWV

SEQ ID NO: 89 - protein, 10 aa, synthetic construct
  REGION 1..10: note = Synthetic construct
CPYAGSYTWV

SEQ ID NO: 90 - protein, 10 aa, synthetic construct
  REGION 1..10: note = Synthetic construct
CSYAGRYNWV

SEQ ID NO: 91 - protein, 10 aa, synthetic construct
  REGION 1..10: note = Synthetic construct
CSYAGSYNWV

SEQ ID NO: 92 - protein, 10 aa, synthetic construct
  REGION 1..10: note = Synthetic construct
CSYAGSYWAV

SEQ ID NO: 93 - protein, 10 aa, synthetic construct
  REGION 1..10: note = Synthetic construct
CTYAGSYTWV

SEQ ID NO: 94 - protein, 11 aa, synthetic construct
  REGION 1..11: note = Synthetic construct
QACDSSSDHVV

SEQ ID NO: 95 - protein, 11 aa, synthetic construct
  REGION 1..11: note = Synthetic construct
QAWDSSNDHVV

SEQ ID NO: 96 - protein, 11 aa, synthetic construct
  REGION 1..11: note = Synthetic construct
QAWDSSSDHVV

SEQ ID NO: 97 - protein, 11 aa, synthetic construct
  REGION 1..11: note = Synthetic construct
QAWYSSSDHVV

SEQ ID NO: 98 - protein, 11 aa, synthetic construct
  REGION 1..11: note = Synthetic construct
QLWDSSSEHVV

SEQ ID NO: 99 - protein, 11 aa, synthetic construct
  REGION 1..11: note = Synthetic construct
QMWDSSSDHVV

SEQ ID NO: 100 - protein, 11 aa, synthetic construct
  REGION 1..11: note = Synthetic construct
QMWDSSSEHVV

SEQ ID NO: 101 - protein, 11 aa, synthetic construct
  REGION 1..11: note = Synthetic construct
QVWDSSSEHVV

SEQ ID NO: 102 - protein, 16 aa, synthetic construct
  REGION 1..16: note = Synthetic construct
ARGPPPGVANHKWFDT

SEQ ID NO: 103 - protein, 16 aa, synthetic construct
  REGION 1..16: note = Synthetic construct
ARITPPGVVNNKWFDL

SEQ ID NO: 104 - protein, 16 aa, synthetic construct
  REGION 1..16: note = Synthetic construct
ARVAPPGVVNNKWFDI

SEQ ID NO: 105 - protein, 16 aa, synthetic construct
  REGION 1..16: note = Synthetic construct
ARVAPPGVVNNKWFDT

SEQ ID NO: 106 - protein, 16 aa, synthetic construct
  REGION 1..16: note = Synthetic construct
ARVPPPGVANHKWFDT

SEQ ID NO: 107 - protein, 16 aa, synthetic construct
  REGION 1..16: note = Synthetic construct
ARVPPPGVVNNKWLDL

SEQ ID NO: 108 - protein, 16 aa, synthetic construct
  REGION 1..16: note = Synthetic construct
ARVSPPGVVNKKWFDI

SEQ ID NO: 109 - protein, 20 aa, synthetic construct
  REGION 1..20: note = Synthetic construct
ARSEKRITMARKIKGRWFDP

SEQ ID NO: 110 - protein, 20 aa, synthetic construct
  REGION 1..20: note = Synthetic construct
ARSEKRVTMTRKIKGRWFGP

SEQ ID NO: 111 - protein, 20 aa, synthetic construct
  REGION 1..20: note = Synthetic construct
SRSEPRKTTARKIKGRWFDP

SEQ ID NO: 112 - protein, 20 aa, synthetic construct
  REGION 1..20: note = Synthetic construct
TRSEKRITLALKIKGRWFDP

SEQ ID NO: 113 - protein, 20 aa, synthetic construct
  REGION 1..20: note = Synthetic construct
TRSEKRITLARKIKGRWFDP

SEQ ID NO: 114 - protein, 20 aa, synthetic construct
  REGION 1..20: note = Synthetic construct
TRSEKRITLVRKIKGRWFDP

SEQ ID NO: 115 - protein, 20 aa, synthetic construct
  REGION 1..20: note = Synthetic construct
TRSEKRNTMARKIKGRSFDS

SEQ ID NO: 116 - protein, 20 aa, synthetic construct
  REGION 1..20: note = Synthetic construct
TRSEKRNTMARKIKGRWFDS

SEQ ID NO: 117 - protein, 20 aa, synthetic construct
  REGION 1..20: note = Synthetic construct
TRSENRLTLARKIKGRWFGP

SEQ ID NO: 118 - protein, 20 aa, synthetic construct
  REGION 1..20: note = Synthetic construct
TRSEPRNTLARKIKGRWFDP

SEQ ID NO: 119 - protein, 112 aa, synthetic construct
  REGION 1..112: note = Synthetic construct
DIVLTQSPLSLSVTPGEPASISCRSNQSLLHNNGYNFLDWYLQKPGQSPQLLIYLASSRASGVPDRFSGSGSGTDFTLRISRVEAEDVGVYYCMQPLQLPDTFGGGTKVEIK

SEQ ID NO: 120 - protein, 111 aa, synthetic construct
  REGION 1..111: note = Synthetic construct
DIVMTQSPLSLPVTPGEPASISCRSSQSLLHGNGYNFLDWYLQRPGQSPHLLIYLGSNRASGVPDRFSGSGSGTSFTLTISRVEAEDVGVYYCMQSLQAPLTFGGGTNVEI

SEQ ID NO: 121 - protein, 112 aa, synthetic construct
  REGION 1..112: note = Synthetic construct
DIVLTQSPLSLAVTPGEPASISCRSSQSLLHNNGYNFLDWYVQKPGQSPQLLIYLGSYRASGVPDRFSGSGSGTDFTLKISRVEAEDVGVYYCMQPLQLPDTFGGGTRVEIK

SEQ ID NO: 122 - protein, 112 aa, synthetic construct
  REGION 1..112: note = Synthetic construct
DIVLTQSPLSLPVTPGESASISCRSSQSLLHSNGYNFLDWYVQKPGQSPQLLIYLGSYRASGVPDRFSGSGSGTDFTLKISRVEAEDVGVYYCMQPLQLPDTFGGGTKVEIK

SEQ ID NO: 123 - protein, 112 aa, synthetic construct; identical to SEQ ID NO: 122
  REGION 1..112: note = Synthetic construct

SEQ ID NO: 124 - protein, 112 aa, synthetic construct
  REGION 1..112: note = Synthetic construct
DIVMTQSPLSLSVTPGEPASISCRSSQSLLHSNGYNFLDWYVQKPGQSPQLLIYLASSRASGVPDRFSGSGSGTDFTLKISRVEAEDVGVYYCMQPLQLPDTFGGGTKVEIK

SEQ ID NO: 125 - protein, 112 aa, synthetic construct
  REGION 1..112: note = Synthetic construct
DIVMTQSPLSLPVTPGELASISCRSSQSLLHSNGYNYLDWYLQKPGQSPQLLIYLGSNRASGVPDRFSGSGSGTDFTLKISRVEADDAGVYYCMQTLQLPRTFGGGTTVEIK

SEQ ID NO: 126 - protein, 112 aa, synthetic construct
  REGION 1..112: note = Synthetic construct
DIVMTQSPLSLPVTPGESASISCRSSQSLLHSNGYNYLDWYLQKPGQSPQLLIYLGSNRASGVPDRFSGSGADTDFTLKISRVEAEDVGVYYCMQALQSPYTFGGGTKLEIK

SEQ ID NO: 127 - protein, 112 aa, synthetic construct
  REGION 1..112: note = Synthetic construct
DIVMTQSPLSLPVTPGEPASISCKSSQSLLHSNGHNYLDWYLQKPGQSPQLLIYLGSNRASGVPDRFSGSGSGTDFTLKISRVEPEDVGVFYCMQGLQTPLTFGGGTKVEIK

SEQ ID NO: 128 - protein, 112 aa, synthetic construct
  REGION 1..112: note = Synthetic construct
DIVMTQSPLSLPVTPGEPASISCRSSQSLLHSNGYNYLDWYLQKPGQCPQLLIYLGSNRASGVPDRISGIGSGTDFTLKISRVEAEDVGVYYCMQGLQTPLTFGGGTKVEIK

SEQ ID NO: 129 - protein, 86 aa, synthetic construct
  REGION 1..86: note = Synthetic construct
QSLLHSNGYNYLDWYLQKPGQSPQLLIYLASNRASGVPGRFSGSGSGKDFTLKISRVEAEDIGVYYCMQGLQTPLTFGGGTKVEIK

SEQ ID NO: 130 - protein, 112 aa, synthetic construct
  REGION 1..112: note = Synthetic construct
DIVMTQSPLSLPVTPGEPASISCRSSQSLLHSNGYNYLAWYLQKPGQSPQLLIYLGSNRASGVPDRFSGSGSGTDFTLRISRVEAEDVGIYYCMQGLQTPLTFGGGTKVEIK

SEQ ID NO: 131 - protein, 111 aa, synthetic construct
  REGION 1..111: note = Synthetic construct
DIVMTQSPLSLPVTPGEPASISCRSSKSLQHRNGNNYLDWYVQKPGQSPQVLIYLGSNRASGVPDRFSGSGSGTDFTLKISRVEAEDVGVYYCMQGLQTPLTFGGGTKVEI

SEQ ID NO: 132 - protein, 112 aa, synthetic construct
  REGION 1..112: note = Synthetic construct
DIVLTQSPLSLSVTPGEPASISCKSSQSLLDSHGYNSLDWYLQKSGESPQLLIYVASHRASGVPDRFSGSESGTDFTLKISRVEAEDVGVYYCMQGLQTPLTFGGGTKLEIK

SEQ ID NO: 133 - protein, 112 aa, synthetic construct
  REGION 1..112: note = Synthetic construct
DIVMTQSPLSLPVTPGEPASISCRSSQSLLHTNGYNYLDWYLQKPGQSPQLLIYLGSNRASGVPDRFSGSGSGIDFTLKISRVEAEDVGVYYCMQGLQTPLTFGGGTKVEIK

SEQ ID NO: 134 - protein, 86 aa, synthetic construct
  REGION 1..86: note = Synthetic construct
QSLLHSNGYNYLDWYLQKPGQSPQLLIYLGSNRASGVPDRFSGSGSGTDFTLKISRVEAEDVGVYYCMQGLQTPLTFGGGTKVEIK

SEQ ID NO: 135 - protein, 112 aa, synthetic construct
  REGION 1..112: note = Synthetic construct
DIVMTQSPLSLPVTPGEPASISCRSSQSLLHSNGYNYLDWYLQKPGQSPQLLIYMGSNRASGVPDRFSGSGSGTDFTLKISRVEAEDVGIYYCMQGLQTPLTFGGGTKVEIK

SEQ ID NO: 136 - protein, 112 aa, synthetic construct
  REGION 1..112: note = Synthetic construct
DIVMTQSPLSLPVTPGEPASISCRSSQSLLHSNGYNYLDWYLQKPGQSPQLLIYLGSNRASGVPDRFSGSGSGTDFTLKISRVEAEDVGVYYCMQGLQTPLTFGGGTKVEIK

SEQ ID NO: 137 - protein, 112 aa, synthetic construct; identical to SEQ ID NO: 135
  REGION 1..112: note = Synthetic construct

SEQ ID NO: 138 - protein, 112 aa, synthetic construct; identical to SEQ ID NO: 130
  REGION 1..112: note = Synthetic construct

SEQ ID NO: 139 - protein, 112 aa, synthetic construct
  REGION 1..112: note = Synthetic construct
DIVMTQSPLSLPVTPGEPASISCKSSQSLLYSNGHNYLDWYLQKPGQSPQLLIYLGSNRASGVPDRFSGSGSGTDFTLKISRVEPEDVGVFYCMQGLQTPLTFGGETKVEIK

SEQ ID NO: 140 - protein, 112 aa, synthetic construct; identical to SEQ ID NO: 130
  REGION 1..112: note = Synthetic construct

SEQ ID NO: 141 - protein, 112 aa, synthetic construct
  REGION 1..112: note = Synthetic construct
DIVMTQSPLSLPVTPGEAASISCRSSQSLLHSNGYKYLDWYLQKPGQSPQLLIYLGSNRASGVPDRFSGSGSGTDFTLKISRVEAEDVGVYFCMQGLQTPLTFGGGTKVEIK

SEQ ID NO: 142 - protein, 112 aa, synthetic construct
  REGION 1..112: note = Synthetic construct
DIVMTQSPLSLPVTPGQPASISCRSSQSLLHSNGYNYLDWYLQKPGQSPQLLIYVGSNRASGVPDRFSGSGSGTDFTLKISRVEAEDVGVYYCMQGLQTPLTFGGGTKVEIK

SEQ ID NO: 143 - protein, 57 aa, synthetic construct
  REGION 1..57: note = Synthetic construct
GSHRASGVPDRFIGSGSGTDFTLKISRVEAEDVGVYYCMQALQIPYTFGGGTRVEIK

SEQ ID NO: 144 - protein, 86 aa, synthetic construct
  REGION 1..86: note = Synthetic construct
QSLLYSTGYNHLDWYLQKPGQSPQLLISLGSNRASGVPDRFSGSGSGTDFALKISRVEAEDVGVYYCMQALQIPYTFGGGTRVEIK

SEQ ID NO: 145 - protein, 57 aa, synthetic construct; identical to SEQ ID NO: 143
  REGION 1..57: note = Synthetic construct

SEQ ID NO: 146 - protein, 112 aa, synthetic construct
  REGION 1..112: note = Synthetic construct
DIVMTQPPLPLPVIPGEPASFSCTSSQSLLHGNGYNYLDRYLQKPGQSPQLLIYLGSNRASGVPDRFSGSGSGTDFTLRISRVEADDVGVYYCMQALQIPYTFGVGTKMEIK

SEQ ID NO: 147 - protein, 112 aa, synthetic construct
  REGION 1..112: note = Synthetic construct
DIVMTQSPLSLPVTPGEPASISCRSSQSLLHANGYNYLDWYLQRPGQSPQLLIYLGSNRASGVPDRFSGSGSGTDFTLKISRVEAEDVGVYYCMQALQVPPTFGGGTTVEIK

SEQ ID NO: 148 - protein, 112 aa, synthetic construct
  REGION 1..112: note = Synthetic construct
DIVMTQSPLSLPVTPGEPASISCKSSRSLLHSNGKTYLDWFLQKPGQSPQLLISLGSNRASGVPDRFSGSGSGTDFTLKISRMEAEDVGVYYCMQGLQAPLTFGGGTKVEIK

SEQ ID NO: 149 - protein, 112 aa, synthetic construct
  REGION 1..112: note = Synthetic construct
DIVVTQSPLSLSVTPGEPASISCRSSQTLLYSNGYNYLDWYLQKPGQSPQLLIYLGSNRASGVSDRFSASGSGTDFTLKISKVEADDAGVYYCMQTLQLPLTFGGGTTVETK

SEQ ID NO: 150 - protein, 112 aa, synthetic construct
  REGION 1..112: note = Synthetic construct
DIVVTQSPLSLSVTPGEPAPISCRSSQTLLYSNGYNYLDWYLQKPGQSPQLLIYLGSNRASGVSDRFSASGSGTDFTLKISKVEADDAGVYYCMQTLQLPLTFGGGTTVEIK

SEQ ID NO: 151 - protein, 112 aa, synthetic construct
  REGION 1..112: note = Synthetic construct
DIVVTQSPLSLSVTPGEPASISCRSSQTLLYSNGYNYLDWYLQKPGQSPQLLIYLGSNRASGVSDRFSASGSGTDFTLKISKVEADDAGVYYCMQTLQLPLTFGGGTTVEIK

SEQ ID NO: 152 - protein, 112 aa, synthetic construct; identical to SEQ ID NO: 151
  REGION 1..112: note = Synthetic construct

SEQ ID NO: 153 - protein, 112 aa, synthetic construct
  REGION 1..112: note = Synthetic construct
DIVVTQSPLSLSVTPGEPASISCRSSQTLLYSNGYNYLDWYLQKPGQSPQLLIYLGSNRASGVSDRFSASGSGTDFTLKISKVEADDAGVYFCMQTLQLPLTFGGGTTVEIK

SEQ ID NO: 154 - protein, 112 aa, synthetic construct
  REGION 1..112: note = Synthetic construct
DIVVTQSPLSLSVTPGEPASISCRSSQTLLYSNGYNYLDWYLQKPGQSPQLLIYLGSNRASGVSDRFSASGSGTDLTLKISKVEADDAGVYYCMQTLQLPLTFGGGTTVEIK

SEQ ID NO: 155 - protein, 112 aa, synthetic construct; identical to SEQ ID NO: 151
  REGION 1..112: note = Synthetic construct

SEQ ID NO: 156 - protein, 112 aa, synthetic construct; identical to SEQ ID NO: 151
  REGION 1..112: note = Synthetic construct

SEQ ID NO: 157 - protein, 112 aa, synthetic construct; identical to SEQ ID NO: 151
  REGION 1..112: note = Synthetic construct

SEQ ID NO: 158 - protein, 86 aa, synthetic construct
  REGION 1..86: note = Synthetic construct
QTLLYSNGYNYLDWYLQKPGQSPQLLIYLGSNRASGVSDRFSASGSGTDFTLKISKVEADDAGVYYCMQTLQLPLTFGGGTTVEIK

SEQ ID NO: 159 - protein, 86 aa, synthetic construct; identical to SEQ ID NO: 158
  REGION 1..86: note = Synthetic construct

SEQ ID NO: 160 - protein, 112 aa, synthetic construct; identical to SEQ ID NO: 151
  REGION 1..112: note = Synthetic construct

SEQ ID NO: 161 - protein, 112 aa, synthetic construct; identical to SEQ ID NO: 151
  REGION 1..112: note = Synthetic construct

SEQ ID NO: 162 - protein, 112 aa, synthetic construct
  REGION 1..112: note = Synthetic construct
DIVVTQSPLSLSVTPGELASISCRSSQTLLYSNGYNYLDWYLQKPGQSPQLLIYLGSNRASGVSDRFSASGSGTDFTLKISKVEADDAGVYYCMQTLQLPLTFGGGTTVEIK

SEQ ID NO: 163 - protein, 112 aa, synthetic construct; identical to SEQ ID NO: 151
  REGION 1..112: note = Synthetic construct

SEQ ID NO: 164 - protein, 86 aa, synthetic construct; identical to SEQ ID NO: 158
  REGION 1..86: note = Synthetic construct

SEQ ID NO: 165 - protein, 112 aa, synthetic construct; identical to SEQ ID NO: 151
  REGION 1..112: note = Synthetic construct

SEQ ID NO: 166 - protein, 112 aa, synthetic construct
  REGION 1..112: note = Synthetic construct
DVVMTQTPLSLPVTPGEPASISCRSSQTLLYSNGYNYLDWYLQKPGQSPQLLIYLGSNRASGGSDRFSASGSGTDFTLKISKVEADDAGVYYCMQTLQLPLTFGGGTTVEIK

SEQ ID NO: 167 - protein, 86 aa, synthetic construct; identical to SEQ ID NO: 158
  REGION 1..86: note = Synthetic construct

SEQ ID NO: 168 - protein, 112 aa, synthetic construct; identical to SEQ ID NO: 151
  REGION 1..112: note = Synthetic construct

SEQ ID NO: 169 - protein, 58 aa, synthetic construct
  REGION 1..58: note = Synthetic construct
LGSNRASGVSDRFSASGSGTDFTLKISKVEADDAGVYYCMQTLQLPLTFGGGTTVEIK

SEQ ID NO: 170 - protein, 112 aa, synthetic construct; identical to SEQ ID NO: 151
  REGION 1..112: note = Synthetic construct

SEQ ID NO: 171 - protein, 20 aa, synthetic construct
  REGION 1..20: note = Synthetic construct
CMQTLQLPLTFGGGTTVEIK

SEQ ID NO: 172 - protein, 112 aa, synthetic construct; identical to SEQ ID NO: 151
  REGION 1..112: note = Synthetic construct

SEQ ID NO: 173 - protein, 112 aa, synthetic construct; identical to SEQ ID NO: 151
  REGION 1..112: note = Synthetic construct

SEQ ID NO: 174 - protein, 112 aa, synthetic construct; identical to SEQ ID NO: 151
  REGION 1..112: note = Synthetic construct

SEQ ID NO: 175 - protein, 86 aa, synthetic construct; identical to SEQ ID NO: 158
  REGION 1..86: note = Synthetic construct

SEQ ID NO: 176 - protein, 112 aa, synthetic construct; identical to SEQ ID NO: 151
  REGION 1..112: note = Synthetic construct

SEQ ID NO: 177 - protein, 112 aa, synthetic construct
  REGION 1..112: note = Synthetic construct
DIVVTQSPLSLSVTPGEPASISCRSSQTLLYSNGYNYLDWYLQKPGQSPQLLIYLGSNRASGVSDRFSVSGSGTDFTLKISKVEADDAGVYYCMQTLQLPLTFGGGTTVEIK

SEQ ID NO: 178 - protein, 112 aa, synthetic construct; identical to SEQ ID NO: 151
  REGION 1..112: note = Synthetic construct

SEQ ID NO: 179 - protein, 112 aa, synthetic construct; identical to SEQ ID NO: 151
  REGION 1..112: note = Synthetic construct

SEQ ID NO: 180 - protein, 112 aa, synthetic construct; identical to SEQ ID NO: 151
  REGION 1..112: note = Synthetic construct

SEQ ID NO: 181 - protein, 112 aa, synthetic construct; identical to SEQ ID NO: 151
  REGION 1..112: note = Synthetic construct

SEQ ID NO: 182 - protein, 112 aa, synthetic construct
  REGION 1..112: note = Synthetic construct
DIVVTQSPLSLSVTPGEPASISCRSSQALLYSNGYNYLDWYLQKPGQSPQLLIYLGSNRASGVSDRFSASGSGTDFTLKISKVEADDAGVYYCMQTLQLPLTFGGGTTVEIK

SEQ ID NO: 183 - protein, 55 aa, synthetic construct
  REGION 1..55: note = Synthetic construct
NRASGVSDRFSASGSGTDFTLKISKVEADDAGVYYCMQTLQLPLTFGGGTTVEIK

SEQ ID NO: 184 - protein, 112 aa, synthetic construct; identical to SEQ ID NO: 151
  REGION 1..112: note = Synthetic construct

SEQ ID NO: 185 - protein, 112 aa, synthetic construct; identical to SEQ ID NO: 151
  REGION 1..112: note = Synthetic construct

SEQ ID NO: 186 - protein, 112 aa, synthetic construct
  REGION 1..112: note = Synthetic construct
DIVMTQSPLSLPVTPGEPASISCRSSQSLLHSSGYIGVDWYLQKPGQSPQILIYMGSNRASGVPDRFSGSGSGTDFTLKISRVEAEDVGVYYCMQGLQIPYTFGGGTRVEIK

SEQ ID NO: 187 - protein, 111 aa, synthetic construct
  REGION 1..111: note = Synthetic construct
DIVMTQSPLSLPVTPGEPASISCRSSQSLLHSAGYNGVDWYLQKPGQSPHLLIYMGSNRASGVPDRFSGSGSGTDFTLKISRVEAEDVGVYYCMQGLQIPYTFGGGTRVEI

SEQ ID NO: 188 - protein, 112 aa, synthetic construct
  REGION 1..112: note = Synthetic construct
DIVVTQSPLFLVVTPGEPASISCRSSQSLVQSNGYSFLDWYLQKPGQSPQLLIYLGSNRASGVPDRFSGSGSGTDFTLKISKVEAEDVGIYYCMQDLQTPLTFGGGTKVEIK

SEQ ID NO: 189 - protein, 112 aa, synthetic construct; identical to SEQ ID NO: 188
  REGION 1..112: note = Synthetic construct

SEQ ID NO: 190 - protein, 112 aa, synthetic construct
  REGION 1..112: note = Synthetic construct
DIVMTQSPLSLPVTPGEPASISCRSSQSLLHSNRYNYLDWYLQKPGQSPQVLIYLGSNRASGVPDRFSGSGSGTDFTLKISRVEAEDVGVYYCMQYLQTPLTFGGGTKVEIK

SEQ ID NO: 191 - protein, 112 aa, synthetic construct; identical to SEQ ID NO: 190
  REGION 1..112: note = Synthetic construct

SEQ ID NO: 192 - protein, 20 aa, synthetic construct
  REGION 1..20: note = Synthetic construct
CMQALQHPHTFGGGTKMEIK

SEQ ID NO: 193 - protein, 112 aa, synthetic construct
  REGION 1..112: note = Synthetic construct
DIVMTQSPLSLPVTPGEPASISCRSSQSLLHSNGYNYLDWYLQKPGQSPQLLIYLGSNRASGVPDRFSGSGSGTDFTLKISRVAAEDVGVYYCMQALQSPPTFGGGTTVEIK

SEQ ID NO: 194 - protein, 86 aa, synthetic construct
  REGION 1..86: note = Synthetic construct
QSLLNDDEYNYLDWYLQKPGQSPQLLIYLGSYRASGVSDRFSGSGSGTEFTLKISRVEPEDVGIYYCMQALQSPPTFGGGTKVEIK

SEQ ID NO: 195 - protein, 112 aa, synthetic construct
  REGION 1..112: note = Synthetic construct
DIVMTQSPLSLPVTPGEPASISCRSSQSLLHSNGYNYLDRYLQKPGQSPQLLIYLGSNRASGVADRFSGSGSGTDFTLKISRVAAEDVGVYYCMQALQSPPTFGGGTTVEIK

SEQ ID NO: 196 - protein, 112 aa, synthetic construct
  REGION 1..112: note = Synthetic construct
DIVMTQSPLSLPVTPGEPASISCRSSQSLLHANGYNYLDWYLQRPGQSPQLLIYLGSNRASGVPDRFSGSGSGTDFTLKISRVEAEDVGVYYCMQALQIPPTFGGGTTVEIK

SEQ ID NO: 197 - protein, 112 aa, synthetic construct; identical to SEQ ID NO: 196
  REGION 1..112: note = Synthetic construct

SEQ ID NO: 198 - protein, 112 aa, synthetic construct
  REGION 1..112: note = Synthetic construct
DVVLTQSPVSLPVTPGDPASISCRSSQSLLHANGYNYLDWYLQRPGQSPQLLIYLGSNRASGVPDRFSGSGSGTDFTLKISRVEAEDVGVYYCMQALQIPPTFGGGTTVEIK

SEQ ID NO: 199 - protein, 112 aa, synthetic construct
  REGION 1..112: note = Synthetic construct
DIVMTQSPLSLPVTPGEPASISCRSSQSLLHANGYNYLDWYLQRPGQSTQLLIYLGSNRASGVPDRFSGSGSGTDFTLKISRVEAEDVGVYYCMQALQIPPTFGGGTTVEIK

SEQ ID NO: 200 - protein, 112 aa, synthetic construct
  REGION 1..112: note = Synthetic construct
DIVMTQSPLSLPVTPGEPASISCRSSQSLLHTNGYNYLDWYLQKPGQSPQLLIFLGSNRASGVPDRFSGSGSGTDFTLKITRVEAEDVGVYYCMQALQIPPTFGGGTTVEIK

SEQ ID NO: 201 - protein, 20 aa, synthetic construct
  REGION 1..20: note = Synthetic construct
CMQALQIPPTFGGGTTVEIK

SEQ ID NO: 202 - protein, 112 aa, synthetic construct; identical to SEQ ID NO: 196
  REGION 1..112: note = Synthetic construct

SEQ ID NO: 203 - protein, 112 aa, synthetic construct; identical to SEQ ID NO: 196
  REGION 1..112: note = Synthetic construct

SEQ ID NO: 204 - protein, 112 aa, synthetic construct; identical to SEQ ID NO: 196
  REGION 1..112: note = Synthetic construct

SEQ ID NO: 205 - protein, 20 aa, synthetic construct
  REGION 1..20: note = Synthetic construct
CMQALQIPPTFGGGTTVEIK

SEQ ID NO: 206 - protein, 112 aa, synthetic construct; identical to SEQ ID NO: 196
  REGION 1..112: note = Synthetic construct

SEQ ID NO: 207 - protein, 112 aa, synthetic construct; identical to SEQ ID NO: 196
  REGION 1..112: note = Synthetic construct

SEQ ID NO: 208 - protein, 112 aa, synthetic construct; identical to SEQ ID NO: 196
  REGION 1..112: note = Synthetic construct

SEQ ID NO: 209 - protein, 112 aa, synthetic construct; identical to SEQ ID NO: 196
  REGION 1..112: note = Synthetic construct

SEQ ID NO: 210 - protein, 112 aa, synthetic construct; identical to SEQ ID NO: 196
  REGION 1..112: note = Synthetic construct

SEQ ID NO: 211 - protein, 58 aa, synthetic construct
  REGION 1..58: note = Synthetic construct
LGSNRASGVPDRFSGSGSGTDFTLKISRVEAEDVGVYYCMQALQIPPTFGGGTTVEIK

SEQ ID NO: 212 - protein, 112 aa, synthetic construct; identical to SEQ ID NO: 196
  REGION 1..112: note = Synthetic construct

SEQ ID NO: 213 - protein, 112 aa, synthetic construct
  REGION 1..112: note = Synthetic construct
DIVMTQSPLSLPVAPGEPASISCRSSRSLLHSNGYTYLDWYLQKPGKSPQLLIYLTSDRASGVPDRFSGSGSGSYFTLNISRVEAEDVGVYYCMQALQIPPTFGGGTKVEVK

SEQ ID NO: 214 - protein, 20 aa, synthetic construct
  REGION 1..20: note = Synthetic construct
CMQALQIPPTFGGGTTVEIK

SEQ ID NO: 215 - protein, 112 aa, synthetic construct
  REGION 1..112: note = Synthetic construct
DIVMTQSPLSLPVTPGEPASISCRSSQSLLHSNGYNYLDWYLQKLGQSPQLLIYLGSNRASGVPDRFSGSGSGTDFTLKISRVEAEDVGVYYCMQVLQTPLTFGGGTKVEIK

SEQ ID NO: 216 - protein, 112 aa, synthetic construct
  REGION 1..112: note = Synthetic construct
DIVMTQSPLSLPVTPGEPASISCRSTQSLLHSNGYTYLDWYLQKPGQSPQLLIYLGSNRASGVPDRFSGGGSGTDFTLKISRVEAEDVGVYYCMQVLQTPLTFGGGTKVEIK

SEQ ID NO: 217 - protein, 112 aa, synthetic construct
  REGION 1..112: note = Synthetic construct
DIVMTQSPLSLPVTPGEPASISCRSTQSLLHSNGYTYLDWYLQKPGQSPQLLIYLGSNRASGVPDRFSGGGSGTDFTLKISRVEAEDVGVYFCMQVLQTPLTFGGGTKVELK

SEQ ID NO: 218 - protein, 112 aa, synthetic construct
  REGION 1..112: note = Synthetic construct
DIVMTQSPLSLPVTPGEPASISCRSSQSLLHSNGYNYLDWYLQKPGQSPQLLIYLGSNRASGVPDRFSGSGSGTDFTLKISRVEAEDVGVYYCMQVLQTPLTFGGGTKVEIK

SEQ ID NO: 219 - protein, 75 aa, synthetic construct
  REGION 1..75: note = Synthetic construct
LNWYLQKPGQSPQLLIYLGSNRASGVPDRLSGSGSGTDFTLKISRVEAEDVGVYYCMQVLQTPLTFGGGTKVEIK

SEQ ID NO: 220 - protein, 86 aa, synthetic construct
  REGION 1..86: note = Synthetic construct
QSLLDSNGYNYLDWYVQKPGQSPQLLIYLGSNRASGVPDRFGGSGSGTDFTLKISRVEAEDVGVYYCMQVLQTPLTFGGGTKVEIK

SEQ ID NO: 221 - protein, 112 aa, synthetic construct
  REGION 1..112: note = Synthetic construct
DIVMTQSPLSLPVTPGEPASISCRSSQSLLHSNGYNYLNWYLQKPGQSPQLLIYLGSNRASGVPDRLSGSGSGTDFTLKISRVEAEDVGVYYCMQVLQTPLTFGGGTKVEIK

SEQ ID NO: 222 - protein, 112 aa, synthetic construct
  REGION 1..112: note = Synthetic construct
DIVMTQSPLSLPVTPGEPASISCRSSQTLLHSNGYNYLDWYLQKPGQSPQLLIYLGSTRAPGVPDRFSGSGSGTDFTLKISRVEAEDVGVYYCMQPLQTPLTFGGGTKVEIK

SEQ ID NO: 223 - protein, 112 aa, synthetic construct
  REGION 1..112: note = Synthetic construct
DIVVTQSPLFLVVTPGEPASISCRSSQSLVQSNGYSFLDWYLQKPGQSPQLLIYLGSNRASGVPDRFSGSGSGTDFTLKISKVEAEDVGFYYCMQPLQPPLTFGGGTMVEIK

SEQ ID NO: 224 - protein, 112 aa, synthetic construct
  REGION 1..112: note = Synthetic construct
DIVMTQSPLSLSVTPGEPASISCRSSQSLLHDDEYNYLDWYVQRPGQSPQLLIYLTSYRAAGVPDRFSGSGSGADFTLKISRVEAEDVGTYYCMQALQSPHTFGGGTKVEIK

SEQ ID NO: 225 - protein, 112 aa, synthetic construct
  REGION 1..112: note = Synthetic construct
DIVLTQSPLSLSVTPGEPASISCRSSQSLLHNNGYNFLDWYVQKPGQSPQLLIYLGSNRASGVPDRFSGSGSGTDFTLKISRVEAEDVGVYYCMQALQSPHTFGGGTRLEIK

SEQ ID NO: 226 - protein, 112 aa, synthetic construct
  REGION 1..112: note = Synthetic construct
DIVMTQSPLSLPVTPGEPASISCRSSQSLLHSNGYNYLDWYLQKPGQSPQLLIYLGSNRASGVPDRFSGSGSGTDFTLKISRVEAEDVGVYYCMQALQIPITFGGGTKVEIK

SEQ ID NO: 227 - protein, 105 aa, synthetic construct
  REGION 1..105: note = Synthetic construct
DIQMTQSPSSLSASVGDRVTITCRASQYIGSFLNWYQQQPGKPPKLLIYAASTLQSGAPLRFSASESGSDFTLTITNLQPEDFATYYCQQSYNVPTFGQGTKVEI

SEQ ID NO: 228 - protein, 106 aa, synthetic construct
  REGION 1..106: note = Synthetic construct
DIQMTQSPSSLSASVGDRVTLTCRASQSISSNLNWYQQKPGKAPKLLIYLTSNLLGGVPSRFSGSGSGTYFTLNISSLQPEDLATYYCQQSYIGQTFGQGTKVEIK

SEQ ID NO: 229 - protein, 106 aa, synthetic construct
  REGION 1..106: note = Synthetic construct
DIQMTQSLSSLSASVGDRVTLTCRASQSISSNLNWYQQKPGKAPKLLIYLTSNLLGGVPSRFSGSGSGTYFTLNISSLQPEDLATYYCQQSYIGQTFGQGTKVEIK

SEQ ID NO: 230 - protein, 104 aa, synthetic construct
  REGION 1..104: note = Synthetic construct
DIQMTQSPSSLSASIGDRVTITCRASQSISDYLNWYQQKPGKAPQLLIYAASNLQGGVPSRFSGSGSGTDFTLTITGLQPEDFATYFCQQSYTTPTFGQGTKVE

SEQ ID NO: 231 - protein, 106 aa, synthetic construct
  REGION 1..106: note = Synthetic construct
DIQMTQSPSSLSASVGDRVTITCRASQSISSYLNWYQQKPGKAPKLLIYAASSLQSGVPSRFSGSGSGTDFTLTISSLQPEDFATYYCQQSYRTVTFGQGTKVEIK

SEQ ID NO: 232 - protein, 106 aa, synthetic construct
  REGION 1..106: note = Synthetic construct
DIQMTQSPSSLSASVGDRVTITCRASQSISSYLNWYQQKPGKAPKLLIYAASSLQSGVPSRFSGSGSGTDFTLTISSLQPEDFATYYCQQSYTTWTFGQGTKVEIK

SEQ ID NO: 233 - protein, 106 aa, synthetic construct
  REGION 1..106: note = Synthetic construct
DIQMTQSPSSLSASVGDRVTITCRASQSISSYLNWYQQKPGKAPKLLIYAASSLQSGVPSRFSGSGSGTDFTLTISSLQPEDFATYYCQQSYPPPTFGQGTKVEIK

SEQ ID NO: 234 - protein, 106 aa, synthetic construct
  REGION 1..106: note = Synthetic construct
DIQMTQSPSSLSASVGDRVTITCRASQSISSYLNWYQQKPGKAPKLLIYAASSLQSGVPSRFSGSGSGTDFTLTISSLQPEDFATYYCQQSYTTRTFGQGTKVEIK

SEQ ID NO: 235 - protein, 106 aa, synthetic construct
  REGION 1..106: note = Synthetic construct
DIQMTQSPSSLSASVGDRVTITCRASQSISFYLHWYQQKPGKAPRLLIYDAASLQRGVPSRFSGSGSGTDFSLTISSLQGEDFATYYCQQSYYTPTFGQGTKVEIK

SEQ ID NO: 236 - protein, 106 aa, synthetic construct
  REGION 1..106: note = Synthetic construct
DIQMTQSPSSLFASVGDRVTITCRASQSITNYLNWYQIKPGIAPKLLITGASGLQSGVPSRFSRSGSGTEFTLTISSLQPEDFANYYCQQSYNAPTFGQRTKVEFK

SEQ ID NO: 237 - protein, 106 aa, synthetic construct
  REGION 1..106: note = Synthetic construct
DIQMTQSPSSLSASIRDRVAITCRASQSISTYLNWYQQKPGKAPKLLIYAASSLQSGVPSRFSGSGSGTDFTLTISSLQPEDFATYYCQQSYRTPTFGQGTKVEIK

SEQ ID NO: 238 - protein, 106 aa, synthetic construct
  REGION 1..106: note = Synthetic construct
DIQMTQSPSSLSASVGDRVTITCRASQSISSYLNWYQQKPGKAPKFLIYAASSLQSGVPSRFSGSGSGTDFTLTISSLQPEDFATYYCQQSYIAPTFGQGTKVEIK

SEQ ID NO: 239 - protein, 106 aa, synthetic construct
  REGION 1..106: note = Synthetic construct
DIQMTQSPSSVSASVGDRVTITCRASQTIGSYLNWFQQKPGKAPKLLIYTASTLESVVPSRFIGSGSGTDFTLTISSLQPDDFATYYCQQSYNTPTFGQGTKVEIK

SEQ ID NO: 240 - protein, 106 aa, synthetic construct
  REGION 1..106: note = Synthetic construct
DIQMTQSPSSLSASVGDRVTITCRASQSISSYLNWYQQKPGKAPKVLIYAASSLQSGVPSRFSGSGSGTDFTLTISSLQPEDFATYYCQQSYNTPTFGQGTKVESK

SEQ ID NO: 241 - protein, 105 aa, synthetic construct
  REGION 1..105: note = Synthetic construct
EIQMAQSPSSLSASVGDRVIITCRTSQNISSYLNWYQLKPGKAPKVLIYAASSLQSGVPSRFSGSGSGTDFTLTINSLQPEDLATYYCQQSYNTPTFGQGTKVEI

SEQ ID NO: 242 - protein, 107 aa, synthetic construct
  REGION 1..107: note = Synthetic construct
EVVLTQSPDFQSVTPKEKVTIICRASQSIGSYLHWYQQKPHQSPKLLIKYASQSISGVPSRFSGSGSGTEFTLTIKSLEAEDAATYYCHQSSSLPFTFGPGTKVDIK

SEQ ID NO: 243 - protein, 107 aa, synthetic construct
  REGION 1..107: note = Synthetic construct
EIVLTQSPDFQSVTPKEKVTITCRASQSIGSSLHWYQQKPDQSPKLLIKYASQSISGVPSRFSGSGSGTDFTLTINSLEAEDAATYYCHQSSSLGGTFGPGTKVDIK

SEQ ID NO: 244 - protein, 107 aa, synthetic construct
  REGION 1..107: note = Synthetic construct
EIVLTQSPDFQSVTPKEKVTITCRASQSIGSSLHWYQQKPDQSPKLLIKYASQSISGVPSRFSGSGSGTDFTLTINSLEAEDAATYYCHQSSSLPQTFGPGTKVYIK

SEQ ID NO: 245 - protein, 107 aa, synthetic construct
  REGION 1..107: note = Synthetic construct
EIVLTQSPDFQSVTPKEKVTITCRASQSIGSSLHWYQQKPDQSPKLLIKYASQSISGVPSRFSGSGSGTDFTLTINSLEAEDAATYYCHQSSSLPQTFGPGTKVDIK

SEQ ID NO: 246 - protein, 81 aa, synthetic construct
  REGION 1..81: note = Synthetic construct
QSIGSSLHWYQQKPDQSPKLLIKYASQSISGVPSRFSGSGSGTDFTLTINSLEAEDAATYYCHQSSSLPQTFGPGTKVDIK

SEQ ID NO: 247 - protein, 107 aa, synthetic construct
  REGION 1..107: note = Synthetic construct
EIVLTQSPDFQSVTPKEKVTITCRASQSIGSSLHWYQQKPDQSPKLLIKYASQSISGVPSRFSGSGSGTDYTLTINSLEAEDAATYYCHQSSSLPQTFGLGTKVDIK

SEQ ID NO: 248 - protein, 107 aa, synthetic construct
  REGION 1..107: note = Synthetic construct
EIVLTQSPDFQSVTPKEKVAITCRASQSIGSSLHWYQQKPDQSPKLLIKYASQSISGVPSRFSGSGSGTDFTLTINSLEAEDAATYYCHQSSSLPQTFGPGTKVDIK

SEQ ID NO: 249 - protein, 81 aa, synthetic construct; identical to SEQ ID NO: 246
  REGION 1..81: note = Synthetic construct

SEQ ID NO: 250 - protein, 107 aa, synthetic construct; identical to SEQ ID NO: 245
  REGION 1..107: note = Synthetic construct

SEQ ID NO: 251 - protein, 81 aa, synthetic construct
  REGION 1..81: note = Synthetic construct
QSIGSSLHWYQQKPDQSPKLLIKYASQSISGVPSRFSGSGSGTDFTLTINSLEAEDAATYYCHQSSSLPQTFGPGTKVAIK

SEQ ID NO: 252 - protein, 107 aa, synthetic construct
  REGION 1..107: note = Synthetic construct
EIVLTQSPAFQSVAPRETVTITCRASQSIGTSLHWYQQKPDQSPKLLINYASQSVSGVPSRFSGSGSGTAFTLTINSLEPEDAATYYCHQSSSLPYTFGPGTKVDIK

SEQ ID NO: 253 - protein, 81 aa, synthetic construct
  REGION 1..81: note = Synthetic construct
QSIGTSLHWYQQKPDQSPKLLINYASQSVSGVPSRFSGSGSGTAFTLTINSLEPEDAATYYCHQSSSLPYTFGPGTKVEIK

SEQ ID NO: 254 - protein, 107 aa, synthetic construct; identical to SEQ ID NO: 252
  REGION 1..107: note = Synthetic construct

SEQ ID NO: 255 - protein, 81 aa, synthetic construct
  REGION 1..81: note = Synthetic construct
QSIGTSLHWYQQKPDQSPKLLINYASQSVSGVPSRFSGSGSGTAFTLTINSLEPEDAATYYCHQSSSLPYTFGPGTKVDIK

SEQ ID NO: 256 - protein, 81 aa, synthetic construct; identical to SEQ ID NO: 255
  REGION 1..81: note = Synthetic construct

SEQ ID NO: 257 - protein, 81 aa, synthetic construct; identical to SEQ ID NO: 255
  REGION 1..81: note = Synthetic construct

SEQ ID NO: 258 - protein, 107 aa, synthetic construct
  REGION 1..107: note = Synthetic construct
EIVLTQSPDFQSVTPGEKVTITCRASQSIGTSLHWYQQRPDQSPMLLINYASQSISGVPSRFSGSGSGTDFTLTINSLEAEDAATYYCHQSRSLPFTFGPGTKVDIK

SEQ ID NO: 259 - protein, 107 aa, synthetic construct
  REGION 1..107: note = Synthetic construct
EIVLTQSPDFQSVTPKEKVTITCRASQSIGSSLHWYQQKPDQSPKLLIKYASQSISGVPSRFSGSGSGTDFTLTINSLEAEDAATYYCHQSSSFLFTFGPGTKVDIK

SEQ ID NO: 260 - protein, 107 aa, synthetic construct
  REGION 1..107: note = Synthetic construct
EIVLTQSPDFQSVTPKEKVTITCRASQSIGSSLHWYQQKPDQPPKLLIKYASQSISGVPSRFSGSGSGTDFTLTINSLEAEDAATYYCHQSSSLLFTFGPGTKVDIK

SEQ ID NO: 261 - protein, 107 aa, synthetic construct
  REGION 1..107: note = Synthetic construct
EIVLTQSPDFQSVTPGEKVTITCRASQSIGTSLHWYQQRPDQSPMLLINYASQSISGVPSRFSGSGSGTDFTLTINSLEAEDAATYYCHQSSSLLFTFGPGTKVDIK

SEQ ID NO: 262 - protein, 107 aa, synthetic construct
  REGION 1..107: note = Synthetic construct
EIVLTQSPDFQSVTPGEKVTITCRASQSIGTSLHWYQQRPDQSPMLLINYASQSISGVPSRFSGSGSGTDFTLTINSLEAEDAATYYCHQSSSLQFTFGPGTKVEIK

SEQ ID NO: 263 - protein, 107 aa, synthetic construct
  REGION 1..107: note = Synthetic construct
EIVLTQSPAFQSVTPKEKVTITCRASQTIGSSLHWYQQKPGQSPKLLIKFASQSFSGVPSRFSGSGSGTNFTLTINSLEAEDAATYYCHQSSSLPFTFGPGTKVDIK

SEQ ID NO: 264 - protein, 107 aa, synthetic construct
  REGION 1..107: note = Synthetic construct
EIVLTQSPDFQSVTPGEKVTITCRASQSIGTSLHWYQQRPDQSPMLLIKYASQSISGVPSRFSGSGSGTEFTLTINSLEAEDAATYYCHQSSSLPFTFGPGTKLDLK

SEQ ID NO: 265 - protein, 107 aa, synthetic construct
  REGION 1..107: note = Synthetic construct
EIVLTQSPDFQSVTPGEKVTITCRASQSIGTSLHWYQQRPDQSPMLLINYASQSISGVPSRFSGSGSGTDFTLTINSLEAEDAATYYCHQSSSLPFTFGPGTKVDIK

SEQ ID NO: 266 - protein, 78 aa, synthetic construct
  REGION 1..78: note = Synthetic construct
QSIGTSLHWYQQRPDQSPMLLIKYASQSISGVPSRFSGSGSGTEFTLTINSLEAEDAATYYCHQSSSLPFTFGPGTKL

SEQ ID NO: 267 - protein, 107 aa, synthetic construct; identical to SEQ ID NO: 265
  REGION 1..107: note = Synthetic construct

SEQ ID NO: 268 - protein, 107 aa, synthetic construct
  REGION 1..107: note = Synthetic construct
EIVLTQSPDFQSVTPGEKVTITCRASQSIGTSLHWYQQRPDQSPMLLINYASQSISGVPSRFSGSGSGTDFTLTINSLEAEDAATYYCHQSSSLPFTFGPGTKVDSK

SEQ ID NO: 269 - protein, 107 aa, synthetic construct; identical to SEQ ID NO: 265
  REGION 1..107: note = Synthetic construct

SEQ ID NO: 270 - protein, 107 aa, synthetic construct; identical to SEQ ID NO: 265
  REGION 1..107: note = Synthetic construct

SEQ ID NO: 271 - protein, 81 aa, synthetic construct
  REGION 1..81: note = Synthetic construct
QSIGTSLHWYQQRPDQSPMLLIKYASQSISGVPSRFSGSGSGTEFTLTINSLEAEDAATYYCHQSSSLPFTFGPGTKLDLK

SEQ ID NO: 272 - protein, 107 aa, synthetic construct
  REGION 1..107: note = Synthetic construct
EIVLTQSPDFQSVTPGEKVTITCRASQSIGTSLHWYQQRPDQSPKLLINYASQSISGVPSRFSGSGSGTDFTLTINSLEAEDAATYYCHQSSSLPFTFGPGTKVDIK

SEQ ID NO: 273 - protein, 107 aa, synthetic construct
  REGION 1..107: note = Synthetic construct
EIVLTQSPDFQSVTPKEKVTITCRASQSIGSSLHWYQQKPDQSPKLLIKYASQSISGVPSRFSGSGSGTDFTLTINSLEAEDAATYYCHQSSSLPFTFGPGTKGDIK

SEQ ID NO: 274 - protein, 107 aa, synthetic construct; identical to SEQ ID NO: 272
  REGION 1..107: note = Synthetic construct

SEQ ID NO: 275 - protein, 107 aa, synthetic construct
  REGION 1..107: note = Synthetic construct
EIVLTQSPDFQSVTPKEKVTITCRASQSIGSSLHWYQQKPDQSPKLLIKYASQSISGVPSRFSGSGSGTDFTLTINSLEAEDAATYYCHQSSSLPFTFGPGTKVDIK

SEQ ID NO: 276 - protein, 107 aa, synthetic construct
  REGION 1..107: note = Synthetic construct
EIVLTQSPDFQSVTPKEKVTITCRASQSIGSSLHWYQQKPDQSPKLLIKYASQSISGVPSRFSGSGSGTDFTLTINSLEAADAATYYCHQSSSLPFTFGPGTKVDIK

SEQ ID NO: 277 - protein, 107 aa, synthetic construct; identical to SEQ ID NO: 265
  REGION 1..107: note = Synthetic construct

SEQ ID NO: 278 - protein, 107 aa, synthetic construct
  REGION 1..107: note = Synthetic construct
EIVLTQSPDFQSVTPKEKVTITCRARQSICSSLHWYQQKPDQSPKLLIKYASQSISGVPSRVSGSGSETDFTLTINSLEAEDAATYYCHQSSSLPFTFGPGTKVEIK

SEQ ID NO: 279 - protein, 107 aa, synthetic construct; identical to SEQ ID NO: 265
  REGION 1..107: note = Synthetic construct

SEQ ID NO: 280 - protein, 107 aa, synthetic construct; identical to SEQ ID NO: 275
  REGION 1..107: note = Synthetic construct

SEQ ID NO: 281 - protein, 81 aa, synthetic construct
  REGION 1..81: note = Synthetic construct
QSIGTSLHWYQQRPDQSPMPLIKYASQSISGVPSRFSGSGSGTEFTLTINSLEAEDAATYYCHQSSSLPFTFGPGTKLDLK

SEQ ID NO: 282 - protein, 107 aa, synthetic construct; identical to SEQ ID NO: 265
  REGION 1..107: note = Synthetic construct

SEQ ID NO: 283 - protein, 107 aa, synthetic construct; identical to SEQ ID NO: 272
  REGION 1..107: note = Synthetic construct

SEQ ID NO: 284 - protein, 81 aa, synthetic construct; identical to SEQ ID NO: 271
  REGION 1..81: note = Synthetic construct

SEQ ID NO: 285 - protein, 107 aa, synthetic construct
  REGION 1..107: note = Synthetic construct
EIVLTQSPDFQSVTPREKVTITCRASQSIGSSLHWYQQKPNQSPKLLIKDASQSFSGVPSRFSGSGSGTDFTLTINSLEAEDAATYYCHQSSSLPFTFGPGTKLEIK

SEQ ID NO: 286 - protein, 81 aa, synthetic construct
  REGION 1..81: note = Synthetic construct
QSIGSSLHWYQQKPDQSPKLLIKYASQSISGVPSRFSGSGSGTDFTLTINSLEAEDAATYYCHQSSSLPFTFGPGTKVDIK

SEQ ID NO: 287 - protein, 107 aa, synthetic construct; identical to SEQ ID NO: 264
  REGION 1..107: note = Synthetic construct

SEQ ID NO: 288 - protein, 107 aa, synthetic construct
  REGION 1..107: note = Synthetic construct
EIVLTQSPDFQSVTPGEKVTITCRASQSIGTSLHWYQQRPNQSPMLLIKYASQSISGVPSRFSGSGSGTEFTLTINSLEAEDAATYYCHQSSSLPFTFGPGTKLDLK

SEQ ID NO: 289 - protein, 107 aa, synthetic construct
  REGION 1..107: note = Synthetic construct
EIVLTQSPDFQSVTPGEKVTITCRASQSIGTSLHWYQQRPDQSPMLLIKYASQSISGVPSRCSGSGSGTEFTLTINSLEAEDAATYYCHQSSSLPFTFGPGTKLDLK

SEQ ID NO: 290 - protein, 107 aa, synthetic construct; identical to SEQ ID NO: 272
  REGION 1..107: note = Synthetic construct

SEQ ID NO: 291 - protein, 107 aa, synthetic construct
  REGION 1..107: note = Synthetic construct
EIVLTQSPDFQSVTPKEKVTITCRASQSIGSSLHWYQQKPDQSPKLLIKYASQSISGVPSRFSGSGSGTDFTLPINSLEAEDAATYYCHQSSSLPFTFGPGTKVEIK

SEQ ID NO: 292 - protein, 20 aa, synthetic construct
  REGION 1..20: note = Synthetic construct
CHQSSSLPFTFGPGTKVDIK

SEQ ID NO: 293 - protein, 81 aa, synthetic construct
  REGION 1..81: note = Synthetic construct
QSIGTSLHWYQQRPDQSPMLLINYASQSISGVPSRFSGSGSGTDFTLTINSLEAEDAATYYCHQSSSLPFTFGPGTKVDIK

SEQ ID NO: 294 - protein, 20 aa, synthetic construct
  REGION 1..20: note = Synthetic construct
CHQSSSLPFTFGPGTKLDLK

SEQ ID NO: 295 - protein, 107 aa, synthetic construct
  REGION 1..107: note = Synthetic construct
EIVLTQSPDFQSVTPGEKVTITCRASQSIGTSLHWYQQGPDQSPMLLINYASQSISGVPSRFSGSGSGTDFTLTINSLEAEDAATYYCHQSSSLPFTFGPGTKVDIK

SEQ ID NO: 296 - protein, 107 aa, synthetic construct; identical to SEQ ID NO: 264
  REGION 1..107: note = Synthetic construct

SEQ ID NO: 297 - protein, 107 aa, synthetic construct; identical to SEQ ID NO: 275
  REGION 1..107: note = Synthetic construct

SEQ ID NO: 298 - protein, 107 aa, synthetic construct; identical to SEQ ID NO: 265
  REGION 1..107: note = Synthetic construct

SEQ ID NO: 299 - protein, 107 aa, synthetic construct
  REGION 1..107: note = Synthetic construct
EIVLTQSPDFQSVTPKEKVTITCRASQSIGSSLHWYQQKPDQSPKLLIKYASQSFSGVPSRFSGSGSGTDFTLTINSLEAEDAATYYCHQSSSLPFTFGPGTKVDIK

SEQ ID NO: 300 - protein, 107 aa, synthetic construct; identical to SEQ ID NO: 275
  REGION 1..107: note = Synthetic construct

SEQ ID NO: 301 - protein, 107 aa, synthetic construct
  REGION 1..107: note = Synthetic construct
EIVLTQSPDFQSVTPGEKVTITCRASQSIGTSLHWYQQRPDQSPMLLINYASQSISGVPSRFSGSGSGTEFTLTINSLEAEDAATYYCHQSSSLPFTFGPGTKVDIK

SEQ ID NO: 302 - protein, 107 aa, synthetic construct; identical to SEQ ID NO: 275
  REGION 1..107: note = Synthetic construct

SEQ ID NO: 303 - protein, 107 aa, synthetic construct; identical to SEQ ID NO: 275
  REGION 1..107: note = Synthetic construct

SEQ ID NO: 304 - protein, 107 aa, synthetic construct; identical to SEQ ID NO: 299
  REGION 1..107: note = Synthetic construct

SEQ ID NO: 305 - protein, 107 aa, synthetic construct; identical to SEQ ID NO: 275
  REGION 1..107: note = Synthetic construct

SEQ ID NO: 306 - protein, 107 aa, synthetic construct; identical to SEQ ID NO: 264
  REGION 1..107: note = Synthetic construct

SEQ ID NO: 307 - protein, 81 aa, synthetic construct
  REGION 1..81: note = Synthetic construct
QSIGSSLHWYQQKPDQSPKLLIKYASQSFSGVPSRFSGSGSGTDFTLTINSLEAEDAATYYCHQSSSLPFTFGPGTKVDIK

SEQ ID NO: 308 - protein, 107 aa, synthetic construct; identical to SEQ ID NO: 265
  REGION 1..107: note = Synthetic construct

SEQ ID NO: 309 - protein, 107 aa, synthetic construct; identical to SEQ ID NO: 272
  REGION 1..107: note = Synthetic construct

SEQ ID NO: 310 - protein, 107 aa, synthetic construct; identical to SEQ ID NO: 299
  REGION 1..107: note = Synthetic construct

SEQ ID NO: 311 - protein, 107 aa, synthetic construct; identical to SEQ ID NO: 265
  REGION 1..107: note = Synthetic construct

SEQ ID NO: 312 - protein, 107 aa, synthetic construct; identical to SEQ ID NO: 264
  REGION 1..107: note = Synthetic construct

SEQ ID NO: 313 - protein, 107 aa, synthetic construct; identical to SEQ ID NO: 265
  REGION 1..107: note = Synthetic construct

SEQ ID NO: 314 - protein, 107 aa, synthetic construct
  REGION 1..107: note = Synthetic construct
EIVLTQSPDFQSVTPKEKVTITCRASQSIGSSLHWYQQKPDQSPKLLIKYASQSISGVPSRFSGSGSGTDFILTINSLEAEDAATYYCHQSSSLPFTFGPGTKVDIK

SEQ ID NO: 315 - protein, 107 aa, synthetic construct; identical to SEQ ID NO: 265
  REGION 1..107: note = Synthetic construct

SEQ ID NO: 316 - protein, 107 aa, synthetic construct
  REGION 1..107: note = Synthetic construct
EIVLTQSPDFQSVTPGEKVTITCRASQSIGTSLHWYQQRPDQSPMLLINYASQSISGVPSRFSGSGSGTDFTLTINSLEAEDAATYYCHQSSSLPFTFGPGTKVEIK

SEQ ID NO: 317 - protein, 107 aa, synthetic construct
  REGION 1..107: note = Synthetic construct
EIVLTQSPDFQSVTPKDKVTITCRASQSIGSSLHWYQQKPDQSPKLLIKSASQSFSGVPSRFSGSGSGTDFTLTINSLEPEDAATYYCHQSSSLPFTFGPGTKVDIK

SEQ ID NO: 318 - protein, 107 aa, synthetic construct; identical to SEQ ID NO: 264
  REGION 1..107: note = Synthetic construct

SEQ ID NO: 319 - protein, 107 aa, synthetic construct; identical to SEQ ID NO: 264
  REGION 1..107: note = Synthetic construct

SEQ ID NO: 320 - protein, 20 aa, synthetic construct
  REGION 1..20: note = Synthetic construct
CHQSSSLPFTFGPGTKVDIK

SEQ ID NO: 321 - protein, 107 aa, synthetic construct; identical to SEQ ID NO: 265
  REGION 1..107: note = Synthetic construct

SEQ ID NO: 322 - protein, 107 aa, synthetic construct; identical to SEQ ID NO: 265
  REGION 1..107: note = Synthetic construct

SEQ ID NO: 323 - protein, 107 aa, synthetic construct
  REGION 1..107: note = Synthetic construct
EIVLTQSPDFQSVTPKERVTISCRASQSIGSSLHWLQQKRDQSPKLLIKYASQSISGVPSRFSGSGSETDFSLTINSLEAEDAATYFCHQSSSLPFTFGPGTKVDIK

SEQ ID NO: 324 - protein, 107 aa, synthetic construct
  REGION 1..107: note = Synthetic construct
EIVLTQSPDFQSVTPGEKVTITCRASQSIGTSLHWYQQRPDQSPMLLINYASQSISGVPSRFSGSGSGTDFILTINSLEAEDAATYYCHQSSSLPFTFGPGTKVDIK

SEQ ID NO: 325 - protein, 107 aa, synthetic construct; identical to SEQ ID NO: 265
  REGION 1..107: note = Synthetic construct

SEQ ID NO: 326 - protein, 107 aa, synthetic construct
  REGION 1..107: note = Synthetic construct
EIVPTQSPDFQSVTPGEKVTITCRASQSIGTSLHWYQQRPDQSPMLLINYASQSISGVPSRFSGSGSGTDFTLTINSLEAEDAAPYYCHQSSSLPFTFGPGTKVDIK

SEQ ID NO: 327 - protein, 81 aa, synthetic construct; identical to SEQ ID NO: 293
  REGION 1..81: note = Synthetic construct

SEQ ID NO: 328 - protein, 107 aa, synthetic construct; identical to SEQ ID NO: 275
  REGION 1..107: note = Synthetic construct

SEQ ID NO: 329 - protein, 58 aa, synthetic construct
  REGION 1..58: note = Synthetic construct
YASQSISGVPSRFSGSGSGTDFTLTINSLEAEDAATYYCHQSSSLPFTFGPGTKVDIK

SEQ ID NO: 330 - protein, 107 aa, synthetic construct
  REGION 1..107: note = Synthetic construct
EIVLTQSPDFQSVTPGEKVTITCRASQSIGTSLHWYQQRPDQSPMLLIKYASQSISGVPSRFSGSGSGTEFTLTINSLVAEDAATYYCHQSSSLPFTFGPGTKLDLK

SEQ ID NO: 331 - protein, 107 aa, synthetic construct
  REGION 1..107: note = Synthetic construct
EIVLTQSPDLQSVTPGEKVTITCRASQSIGTSLHWYQQRPDQSPMLLIKYASQSISGVPSRFSGSGSGTEFTLTINSLEAEDAATYYCHQSSSLPFTFGPGTKLDLK

SEQ ID NO: 332 - protein, 107 aa, synthetic construct; identical to SEQ ID NO: 265
  REGION 1..107: note = Synthetic construct

SEQ ID NO: 333 - protein, 107 aa, synthetic construct; identical to SEQ ID NO: 264
  REGION 1..107: note = Synthetic construct

SEQ ID NO: 334 - protein, 107 aa, synthetic construct
  REGION 1..107: note = Synthetic construct
EIVLTQSPDFQSVTPKEKVTITCRASQSIGSSLHWYQQKPDQFPKLLIKYASQSISGVPSRFSGSGSGTDFTLTINSLEAEDAATYYCHQSSSLPFTFGPGTKVDIK

SEQ ID NO: 335 - protein, 20 aa, synthetic construct
  REGION 1..20: note = Synthetic construct
CHQSSSLPFTFGPGTKVDIK

SEQ ID NO: 336 - protein, 107 aa, synthetic construct
  REGION 1..107: note = Synthetic construct
EIVLTQSPDFQSVTPGEKVTITCRASQSIGTSLHWYQQRPDQSPMLLINYASQSISGVPSRFSGSGSGTDFTLTINSLEAEDSATYYCHQSSSLPFTFGPGTKVDIK

SEQ ID NO: 337 - protein, 107 aa, synthetic construct; identical to SEQ ID NO: 265
  REGION 1..107: note = Synthetic construct

SEQ ID NO: 338 - protein, 107 aa, synthetic construct; identical to SEQ ID NO: 264
  REGION 1..107: note = Synthetic construct

SEQ ID NO: 339 - protein, 107 aa, synthetic construct; identical to SEQ ID NO: 264
  REGION 1..107: note = Synthetic construct

SEQ ID NO: 340 - protein, 78 aa, synthetic construct; identical to SEQ ID NO: 266
  REGION 1..78: note = Synthetic construct

SEQ ID NO: 341 - protein, 107 aa, synthetic construct
  REGION 1..107: note = Synthetic construct
EIVLTQSPDFQSVTPGEKVTITCRASQSIGTSLHWYQQRPDQSLMLLIKYASQSISGVPSRFSGSGSGTEFTLTINSLEAEDAATYYCHQSSSLPFTFGPGTKLDLK

SEQ ID NO: 342 - protein, 107 aa, synthetic construct
  REGION 1..107: note = Synthetic construct
EIVLTQSPDFQSVTPGEKVTITCRASQSIGTSLHWYQQRPDQSPMLLINYASQSISGVPSRFSDSGSGTDFTLTINSLEAEDAATYYCHQSSSLPFTFGPGTKVDIK

SEQ ID NO: 343 - protein, 107 aa, synthetic construct
  REGION 1..107: note = Synthetic construct
EIVLTQSPDFQSVTPGEKVTITCRASQSIGTSLHWYQQRPDQSPMLLINYASQSISGVPSRFSGSGSGTDFTLTINSLEAEDAATYYCHQSSSLPFTFGPGTKADIK

SEQ ID NO: 344 - protein, 107 aa, synthetic construct; identical to SEQ ID NO: 264
  REGION 1..107: note = Synthetic construct

SEQ ID NO: 345 - protein, 81 aa, synthetic construct
  REGION 1..81: note = Synthetic construct
QSIGTSLHWYQQRPDQSPMLLIKYASQSISGVPSRFSGSGSGTEFTLTINSLVAEDAATYYCHQSSSLPFTFGPGTKLDLK

SEQ ID NO: 346 - protein, 107 aa, synthetic construct
  REGION 1..107: note = Synthetic construct
EIVLTQSPDFQSVTPKEKVTITCRASQSIGSSLHWYQQKPDQSPKLLIKYASQSISGVPSRFSGSGSGTDFTLTINSLEAEDAATYYCHQSSSLPWTFGPGTKVDIK

SEQ ID NO: 347 - protein, 107 aa, synthetic construct
  REGION 1..107: note = Synthetic construct
EIVLTQSPDFQSVTPKETVTITCRASQNIGLSLHWYQQKSDQPPELLIKYASQSLSGVPSRFSGSGSGTDFTLTINSLEPEDAATYHCHQTSSLPFTFGPGTKVDIK

SEQ ID NO: 348 - protein, 81 aa, synthetic construct
  REGION 1..81: note = Synthetic construct
QSIGSSLHWYQQKPDQSPKLLIKYASQSISGVPSRFSGSGSGTDFTLTINSLEAEDAATYYCHQSSSFSFTFGPGTKVDIK

SEQ ID NO: 349 - protein, 107 aa, synthetic construct
  REGION 1..107: note = Synthetic construct
EIVLTQTPDFQSVTPKEKVTITCRASQSIGSSLHWYQQKPDQSPKLLIKYASQSISGVPSRFSGSGSGTDFTLTINSLEAEDAATYYCHQSSSLPHTFGPGTKVDIK

SEQ ID NO: 350 - protein, 81 aa, synthetic construct
  REGION 1..81: note = Synthetic construct
QSIGTSLHWYQQRPDQSPMRLIKYASQSISGVPSRFSGSGSGTEFTLTINSLEAEDAATYYCHQSSSLPFAFGPGTKLDLK

SEQ ID NO: 351 - protein, 108 aa, synthetic construct
  REGION 1..108: note = Synthetic construct
DIVMTQSPDSLPVSLGERATINCKSSQSVLYTPNNKNYLAWYQQKPGQPPKLLIYWASIRQSGVPERFSGSGSGTDFTLTISSLQAEDVAVYYCQHFYSSPPTFGRGT

SEQ ID NO: 352 - protein, 113 aa, synthetic construct
  REGION 1..113: note = Synthetic construct
DIVMTQSPDSLAVSLGERATINCKSSQSVLYSPNNKNYLAWYQQRPGQPPKLLIYWASSRQSGVPDRFSGSGSGTDFTLTISSLQAEDVAVYYCQHFYSSPPTFGPGTTVAIK

SEQ ID NO: 353 - protein, 113 aa, synthetic construct
  REGION 1..113: note = Synthetic construct
DIVMTQSPDSLAVSLGERATINCKSSQSVIYSPKNKNYLAWYQQRPGQPPTLLIYWASSRQSGVPDRFSGSGSGTDFTLTISSLQAEDVAVYYCQHFYSSPPTFGPGATVAIK

SEQ ID NO: 354 - protein, 113 aa, synthetic construct; identical to SEQ ID NO: 352
  REGION 1..113: note = Synthetic construct

SEQ ID NO: 355 - protein, 113 aa, synthetic construct; identical to SEQ ID NO: 352
  REGION 1..113: note = Synthetic construct

SEQ ID NO: 356 - protein, 113 aa, synthetic construct; identical to SEQ ID NO: 352
  REGION 1..113: note = Synthetic construct

SEQ ID NO: 357 - protein, 113 aa, synthetic construct; identical to SEQ ID NO: 352
  REGION 1..113: note = Synthetic construct

SEQ ID NO: 358 - protein, 113 aa, synthetic construct; identical to SEQ ID NO: 352
  REGION 1..113: note = Synthetic construct

SEQ ID NO: 359 - protein, 113 aa, synthetic construct; identical to SEQ ID NO: 352
  REGION 1..113: note = Synthetic construct

SEQ ID NO: 360 - protein, 113 aa, synthetic construct
  REGION 1..113: note = Synthetic construct
DIVMTQSPDSLAVSLGERATINCKSSQSVLYSPNNKNYLAWYQQRPGQPPKLLIYWASSRQPGVPDRFSGSGSGTDFTLTISSLQAEDVAVYYCQHFYSSPPTFGPGTTVAIK

SEQ ID NO: 361 - protein, 113 aa, synthetic construct; identical to SEQ ID NO: 352
  REGION 1..113: note = Synthetic construct

SEQ ID NO: 362 - protein, 58 aa, synthetic construct
  REGION 1..58: note = Synthetic construct
WASSRQSGVPDRFSGSGSGTDFTLTISSLQAGDVAVYYCQHFYSSPPTFGPGTTVAIK

SEQ ID NO: 363 - protein, 113 aa, synthetic construct; identical to SEQ ID NO: 352
  REGION 1..113: note = Synthetic construct

SEQ ID NO: 364 - protein, 113 aa, synthetic construct; identical to SEQ ID NO: 352
  REGION 1..113: note = Synthetic construct

SEQ ID NO: 365 - protein, 113 aa, synthetic construct; identical to SEQ ID NO: 352
  REGION 1..113: note = Synthetic construct

SEQ ID NO: 366 - protein, 113 aa, synthetic construct; identical to SEQ ID NO: 352
  REGION 1..113: note = Synthetic construct

SEQ ID NO: 367 - protein, 113 aa, synthetic construct
  REGION 1..113: note = Synthetic construct
DIVMTQSPDSLAVSLGERATINCKSSQSILYSPNNKNYLAWYQQRPGQPPKLLIYWASSRQSGVPDRFSGSGSGTDFTLTISSLQAEDVAVYYCQHFYSSPPTFGPGTTVAIK

SEQ ID NO: 368 - protein, 113 aa, synthetic construct; identical to SEQ ID NO: 352
  REGION 1..113: note = Synthetic construct

SEQ ID NO: 369 - protein, 58 aa, synthetic construct
  REGION 1..58: note = Synthetic construct
WASSRQSGVPGRFSGSGSGTDFTLTISSLQAEDVAVYYCQHFYSSPPTFGPGTTVAIK

SEQ ID NO: 370 - protein, 58 aa, synthetic construct
  REGION 1..58: note = Synthetic construct
WASSRQSGVPDRFSGSGSGTDFTLTISSLQAEDVAVYYCQHFYSSPPTFGPGTTVAIK

SEQ ID NO: 371 - protein, 113 aa, synthetic construct
  REGION 1..113: note = Synthetic construct
DIVMNQSPDSLAVSLGERATINCKSSQSVLYSPNNKNYLAWYQQRPGQPPKLLIYWASSRQSGVPDRFSGSGSGTDFTLTISSLQAEDVAVYYCQHFYSSPPTFGPGTTVAIK

SEQ ID NO: 372 - protein, 113 aa, synthetic construct; identical to SEQ ID NO: 352
  REGION 1..113: note = Synthetic construct

SEQ ID NO: 373 - protein, 113 aa, synthetic construct
  REGION 1..113: note = Synthetic construct
DIVMTQSPDSLAVSLGERATINCKSSLSVLYSPNNKNYLAWYQQRPGQPPKLLIYWASSRQSGVPDRFSGSGSGTDFTLTISSLQAEDVAVYYCQHFYSSPPTFGPGTTVAIK

SEQ ID NO: 374 - protein, 113 aa, synthetic construct; identical to SEQ ID NO: 352
  REGION 1..113: note = Synthetic construct

SEQ ID NO: 375 - protein, 113 aa, synthetic construct
  REGION 1..113: note = Synthetic construct
DIVMTQSPDSLAVSLGERATINCKSSQSVLYSPNNKNYLAWYQQRPGQPPKLLIYWASARQSGVPDRFSGSGSGTDFTLTISSLQAEDVAVYYCQHFYSSPPTFGPGTTVAIK

SEQ ID NO: 376 - protein, 113 aa, synthetic construct; identical to SEQ ID NO: 352
  REGION 1..113: note = Synthetic construct

SEQ ID NO: 377 - protein, 113 aa, synthetic construct; identical to SEQ ID NO: 352
  REGION 1..113: note = Synthetic construct

SEQ ID NO: 378 - protein, 113 aa, synthetic construct
  REGION 1..113: note = Synthetic construct
DIVMAQSPDSLAVSLGARATINCKSSQSVLYSPNNKNYLAWYQQRPGQPPKLLIYWASSRQSGVPDRFSGSGSGTDVTLTISSLQAEDVAVYYCQHFYSSPPTFGPGTTVAIK

SEQ ID NO: 379 - protein, 113 aa, synthetic construct; identical to SEQ ID NO: 352
  REGION 1..113: note = Synthetic construct

SEQ ID NO: 380 - protein, 113 aa, synthetic construct; identical to SEQ ID NO: 352
  REGION 1..113: note = Synthetic construct

SEQ ID NO: 381 - protein, 113 aa, synthetic construct
  REGION 1..113: note = Synthetic construct
DIVMTQSPDSLAVSLGEGATINCKSSQSVLYSPNNKNYLAWYQQRPGQPPKLLIYWASSRQSGVPDRFSGSGSGTDFTLTISSLQAEDVAVYYCQHFYSSPPTFGPGTTVAIK

SEQ ID NO: 382 - protein, 113 aa, synthetic construct; identical to SEQ ID NO: 352
  REGION 1..113: note = Synthetic construct

SEQ ID NO: 383 - protein, 110 aa, synthetic construct
  REGION 1..110: note = Synthetic construct
DIVMTQSPDSLAVSLGERATINCKSSQSVLYSPNNKIYSAWYQQRPGQPPKLLIYWASSRQSGVPDRFSGSGSGTDFTLTISSLQAEDVAVYYCQHFYSSPPTFGPGTTV

SEQ ID NO: 384 - protein, 58 aa, synthetic construct
  REGION 1..58: note = Synthetic construct
WASSRQSGVPDRFSGSGSGTDFTPTISSLQAEDVAVYYCQHFYSSPPTFGPGTTVAIK

SEQ ID NO: 385 - protein, 113 aa, synthetic construct; identical to SEQ ID NO: 352
  REGION 1..113: note = Synthetic construct

SEQ ID NO: 386 - protein, 113 aa, synthetic construct; identical to SEQ ID NO: 352
  REGION 1..113: note = Synthetic construct

SEQ ID NO: 387 - protein, 113 aa, synthetic construct; identical to SEQ ID NO: 352
  REGION 1..113: note = Synthetic construct

SEQ ID NO: 388 - protein, 58 aa, synthetic construct; identical to SEQ ID NO: 370
  REGION 1..58: note = Synthetic construct

SEQ ID NO: 389 - protein, 113 aa, synthetic construct; identical to SEQ ID NO: 352
  REGION 1..113: note = Synthetic construct

SEQ ID NO: 390 - protein, 113 aa, synthetic construct; identical to SEQ ID NO: 352
  REGION 1..113: note = Synthetic construct

SEQ ID NO: 391 - protein, 113 aa, synthetic construct; identical to SEQ ID NO: 352
  REGION 1..113: note = Synthetic construct

SEQ ID NO: 392 - protein, 113 aa, synthetic construct
  REGION 1..113: note = Synthetic construct
DIVMTQSPDSLAASLGEGATINCESSQSVLHSSNNKNYLAWYQQKPGQPPKLLIYWASTRESGVPERFSGSGSGTDFTLTISSLQAEDVAVYYCQHFYSSPPTFGPGTTVAIK

SEQ ID NO: 393 - protein, 75 aa, synthetic construct
  REGION 1..75: note = Synthetic construct
LAWYQQRPGQPPKLLIYWASSRQSGVPDRFSGSGSGTDFTLTISSLQAEDVAVYYCQHFYSSPPTFGPGTTVAIK

SEQ ID NO: 394 - protein, 113 aa, synthetic construct; identical to SEQ ID NO: 352
  REGION 1..113: note = Synthetic construct

SEQ ID NO: 395 - protein, 113 aa, synthetic construct; identical to SEQ ID NO: 352
  REGION 1..113: note = Synthetic construct

SEQ ID NO: 396 - protein, 113 aa, synthetic construct; identical to SEQ ID NO: 352
  REGION 1..113: note = Synthetic construct

SEQ ID NO: 397 - protein, 113 aa, synthetic construct; identical to SEQ ID NO: 352
  REGION 1..113: note = Synthetic construct

SEQ ID NO: 398 - protein, 113 aa, synthetic construct; identical to SEQ ID NO: 352
  REGION 1..113: note = Synthetic construct

SEQ ID NO: 399 - protein, 113 aa, synthetic construct; identical to SEQ ID NO: 352
  REGION 1..113: note = Synthetic construct

SEQ ID NO: 400 - protein, 58 aa, synthetic construct; identical to SEQ ID NO: 370
  REGION 1..58: note = Synthetic construct

SEQ ID NO: 401 - protein, 113 aa, synthetic construct
  REGION 1..113: note = Synthetic construct
DIVMTQSPDSLAVSLGERATINCKSSQSVLYSPNNKNYLAWYQQRPGQPPKLLIYWASSRQSRVPDRFSGSGSGTDFTLTISSLQAEDVAVYYCQHFYSSPPTFGPGTTVAIK

SEQ ID NO: 402 - protein, 75 aa, synthetic construct; identical to SEQ ID NO: 393
  REGION 1..75: note = Synthetic construct

SEQ ID NO: 403 - protein, 113 aa, synthetic construct; identical to SEQ ID NO: 352
  REGION 1..113: note = Synthetic construct

SEQ ID NO: 404 - protein, 113 aa, synthetic construct; identical to SEQ ID NO: 352
  REGION 1..113: note = Synthetic construct

SEQ ID NO: 405 - protein, 113 aa, synthetic construct; identical to SEQ ID NO: 352
  REGION 1..113: note = Synthetic construct

SEQ ID NO: 406 - protein, 113 aa, synthetic construct; identical to SEQ ID NO: 352
  REGION 1..113: note = Synthetic construct

SEQ ID NO: 407 - protein, 113 aa, synthetic construct; identical to SEQ ID NO: 352
  REGION 1..113: note = Synthetic construct

SEQ ID NO: 408 - protein, 113 aa, synthetic construct; identical to SEQ ID NO: 352
  REGION 1..113: note = Synthetic construct

SEQ ID NO: 409 - protein, 58 aa, synthetic construct; identical to SEQ ID NO: 370
  REGION 1..58: note = Synthetic construct

SEQ ID NO: 410 - protein, 113 aa, synthetic construct; identical to SEQ ID NO: 352
  REGION 1..113: note = Synthetic construct

SEQ ID NO: 411 - protein, 110 aa, synthetic construct
  REGION 1..110: note = Synthetic construct
DIVMTQSPDSLAVSLGERATINCKSSQSVLYSPNNKNYLAWYQQRPGQPPKLLIYWASSRQSGVPDRFSGSGSGTDFTLTISSLQAEDVAVYYCQHFYSSPPTFGPGTTV

SEQ ID NO: 412 - protein, 113 aa, synthetic construct; identical to SEQ ID NO: 352
  REGION 1..113: note = Synthetic construct

SEQ ID NO: 413 - protein, 113 aa, synthetic construct
  REGION 1..113: note = Synthetic construct
DIVMTQSPDSLAVSLGERATINCKSSQSVLYSPNNKNYLAWYQQRPGQPPKLLIYWASSRQSGVPDRFSGSGSGTDFTLTISSQQAEDVAVYYCQHFYSSPPTFGPGTTVAIK

SEQ ID NO: 414 - protein, 113 aa, synthetic construct
  REGION 1..113: note = Synthetic construct
DIVMTQSPDSLAVSLGERATINCKSSQSVLYSPNNKNYLAWYQQRPGQPPKLLIYWASSRQSGVPDRFSGSGSGTGFTLTISSLQAEDVAVYYCQHFYSSPPTFGPGTTVAIK

SEQ ID NO: 415 - protein, 113 aa, synthetic construct; identical to SEQ ID NO: 352
  REGION 1..113: note = Synthetic construct

SEQ ID NO: 416 - protein, 113 aa, synthetic construct; identical to SEQ ID NO: 352
  REGION 1..113: note = Synthetic construct

SEQ ID NO: 417 - protein, 58 aa, synthetic construct; identical to SEQ ID NO: 370
  REGION 1..58: note = Synthetic construct

SEQ ID NO: 418 - protein, 113 aa, synthetic construct
  REGION 1..113: note = Synthetic construct
DIVMTQSPDSLAVSQGERATINCKSSQSVLYSPNNKNYLAWYQQRPGQPPKLLIYWASSRQSGVPDRFSGSGSGTDFTLTISSLQAEDVAVYYCQHFYSSPPTFGPGTTVAIK

SEQ ID NO: 419 - protein, 113 aa, synthetic construct; identical to SEQ ID NO: 352
  REGION 1..113: note = Synthetic construct

SEQ ID NO: 420 - protein, 113 aa, synthetic construct; identical to SEQ ID NO: 352
  REGION 1..113: note = Synthetic construct

SEQ ID NO: 421 - protein, 58 aa, synthetic construct; identical to SEQ ID NO: 370
  REGION 1..58: note = Synthetic construct

SEQ ID NO: 422 - protein, 113 aa, synthetic construct; identical to SEQ ID NO: 352
  REGION 1..113: note = Synthetic construct

SEQ ID NO: 423 - protein, 113 aa, synthetic construct
  REGION 1..113: note = Synthetic construct
DIVMTQSPDSLAVSLGERATINCKSSQSVLYSPNKKNYLAWYQQRPGQPPKLLIYWASSRQSGVPDRFSGSGSGTDFTLTISSLQAEDVAVYYCQHFYSSPPTFGPGTTVAIK

SEQ ID NO: 424 - protein, 113 aa, synthetic construct
  REGION 1..113: note = Synthetic construct
DIVMTQSPDSLAVSLGERATINCKSSQSILFSPNNKNYLAWYQQRPGQPPKLLIYWASSRQSGVPDRFSGSGSGTDFTLTISSLQAEDVGVYYCQHFYSSPPTFGPGTTVAIK

SEQ ID NO: 425 - protein, 113 aa, synthetic construct; identical to SEQ ID NO: 352
  REGION 1..113: note = Synthetic construct

SEQ ID NO: 426 - protein, 113 aa, synthetic construct; identical to SEQ ID NO: 352
  REGION 1..113: note = Synthetic construct

SEQ ID NO: 427 - protein, 75 aa, synthetic construct; identical to SEQ ID NO: 393
  REGION 1..75: note = Synthetic construct

SEQ ID NO: 428 - protein, 113 aa, synthetic construct; identical to SEQ ID NO: 352
  REGION 1..113: note = Synthetic construct

SEQ ID NO: 429 - protein, 113 aa, synthetic construct
  REGION 1..113: note = Synthetic construct
DIVMTQSPDSLAVSLGERATINCKSSQSVLYSPNNKNYLAWYQQGPGQPPKLLIYWASSRQSGVPDRFSGSGSGTDFTLTISSLQAEDVAVYYCQHFYSSPPTFGPGTTVAIK

SEQ ID NO: 430 - protein, 113 aa, synthetic construct
  REGION 1..113: note = Synthetic construct
DIVMTQSPDSLAVSLGERATINCKSSQSVLYSPNNKNYLAWYQQRPGQPPKLLIYWASSRQSGVPDRFSGSGSGTDFTLTISSLQAEDVAVNYCQHFYSSPPTFGPGTTVAIK

SEQ ID NO: 431 - protein, 113 aa, synthetic construct; identical to SEQ ID NO: 352
  REGION 1..113: note = Synthetic construct

SEQ ID NO: 432 - protein, 58 aa, synthetic construct; identical to SEQ ID NO: 370
  REGION 1..58: note = Synthetic construct

SEQ ID NO: 433 - protein, 113 aa, synthetic construct
  REGION 1..113: note = Synthetic construct
DIVMTQSPDSLAVTLGERATINCKSSQSVLYTSNNKNYLAWYQQKPGQPPKLLIYRASIRQSGVPDRFSGSGSETDFTLTISSLQAEDVAVYYCQHFYSNPPTFGPGTTVAIK

SEQ ID NO: 434 - protein, 112 aa, synthetic construct
  REGION 1..112: note = Synthetic construct
DIVMTQSPDSLAVSLGERATINCKSSQSVLYTSNNKNYLAWYQQKPGQPPKLLIYWASIRQSGVPDRFTGSWSETDFTLTISSLQAEDVAVYYCQHFYSNPPTFGPGTTVAI

SEQ ID NO: 435 - protein, 113 aa, synthetic construct
  REGION 1..113: note = Synthetic construct
DIVMTQSPDSLAVSLGERATINCKSSQSVLYSSNNKNYLAWYQQKPGQPPKLLIYWASTRESGVPDRFSGSGSGTDFTLTISSLQAEDVAVYYCQHFYSNPPTFGPGTTVAIK

SEQ ID NO: 436 - protein, 113 aa, synthetic construct
  REGION 1..113: note = Synthetic construct
DIVMTQSPDSLAVSLGERATINCKSSQSLLYTSNNKNYLAWYQQKPGQPPKLLIYWASIRQSGVPDRFSGSGSETDFTLTISSLQAEDVAVYYCQHFYSNPPTFGPGTTVAIK

SEQ ID NO: 437 - protein, 113 aa, synthetic construct
  REGION 1..113: note = Synthetic construct
DIVMTQSPDSLAVSLGERATINCKSSQSVLYTSNNKNYLAWYQQKPGQPPKLLIYWASIRQSGVPDRFSGSGSETDFTLSISSLQAEDVAVYYCQHFYSNPPTFGPGTTVAIK

SEQ ID NO: 438 - protein, 113 aa, synthetic construct
  REGION 1..113: note = Synthetic construct
DIVMTQSPDSLAVSLGERATINCKSSQSVLYTSNNKNYLAWYQQKPGQPPKLLIYWASIRQSGVPDRFSGSGSETDFTLTISSLQAEDVAVYYCQHFYSNPPTFGPGTTVAIK

SEQ ID NO: 439 - protein, 108 aa, synthetic construct
  REGION 1..108: note = Synthetic construct
DIVMTQSPDSLAVSLGERATINCKSSQSVLYTSNNKNYLAWDQQKPGQPPKLLIYWASIRQSGVPDRFSGSGSETDFTLTISSLQAEDVAVYYCQHFYSNPPTFGPGT

SEQ ID NO: 440 - protein, 113 aa, synthetic construct; identical to SEQ ID NO: 438
  REGION 1..113: note = Synthetic construct

SEQ ID NO: 441 - protein, 113 aa, synthetic construct
  REGION 1..113: note = Synthetic construct
DIVMTQSPDSLAVSLGERATINCKSSQSVLYTSNNQNYLAWYQQKPGQPPKLLIYWASIRQSGVPDRFSGSGSETDFTLTISSLQAEDVAVYYCQHFYSNPPTFGPGTTVAIK

SEQ ID NO: 442 - protein, 113 aa, synthetic construct; identical to SEQ ID NO: 438
  REGION 1..113: note = Synthetic construct

SEQ ID NO: 443 - protein, 113 aa, synthetic construct; identical to SEQ ID NO: 438
  REGION 1..113: note = Synthetic construct

SEQ ID NO: 444 - protein, 113 aa, synthetic construct; identical to SEQ ID NO: 438
  REGION 1..113: note = Synthetic construct

SEQ ID NO: 445 - protein, 113 aa, synthetic construct; identical to SEQ ID NO: 438
  REGION 1..113: note = Synthetic construct

SEQ ID NO: 446 - protein, 113 aa, synthetic construct; identical to SEQ ID NO: 438
  REGION 1..113: note = Synthetic construct

SEQ ID NO: 447 - protein, 108 aa, synthetic construct
  REGION 1..108: note = Synthetic construct
DIVMTQSPDSLAVSLGERATINCKSSQSVLYTSNNKNYLAWYQQKPGQPPKLLIYWASIRQSGVPDRFSGSGSETDFTLTISSLQAEDVAVYYCQHFYSNPPTFGPGT

SEQ ID NO: 448 - protein, 108 aa, synthetic construct
  REGION 1..108: note = Synthetic construct
DIVMTQSPDSLAVSLGERATINCKSSQSVLYTSNNKNYIAWYQQKPGQPPKLLIYWASIRQSGVPDRFSGSGSETDFTLTISSLQAEDVAVYYCQHFYSNPPTFGPGT

SEQ ID NO: 449 - protein, 87 aa, synthetic construct
  REGION 1..87: note = Synthetic construct
QSVLYTSNNKNYLAWYQQKPGQPPKLLIYWASIRQSGVPDRFSGSGSETDFTLTISSLQAEDVAVYYCQHFYSNPPTFGPGTTVAIK

SEQ ID NO: 450 - protein, 113 aa, synthetic construct; identical to SEQ ID NO: 438
  REGION 1..113: note = Synthetic construct

SEQ ID NO: 451 - protein, 113 aa, synthetic construct; identical to SEQ ID NO: 438
  REGION 1..113: note = Synthetic construct

SEQ ID NO: 452 - protein, 113 aa, synthetic construct; identical to SEQ ID NO: 435
  REGION 1..113: note = Synthetic construct

SEQ ID NO: 453 - protein, 113 aa, synthetic construct
  REGION 1..113: note = Synthetic construct
DIVMTQSPDSLAVSLGERATINCKSSQSVLYTSNNRNYLAWYQQKPGQPPKLLIYWASIRQSGVPDRFSGSGSETDFTLTISSLQAEDVAVYYCQHFYSNPPTFGPGTTVAIK

SEQ ID NO: 454 - protein, 108 aa, synthetic construct; identical to SEQ ID NO: 447
  REGION 1..108: note = Synthetic construct

SEQ ID NO: 455 - protein, 113 aa, synthetic construct; identical to SEQ ID NO: 438
  REGION 1..113: note = Synthetic construct

SEQ ID NO: 456 - protein, 113 aa, synthetic construct; identical to SEQ ID NO: 438
  REGION 1..113: note = Synthetic construct

SEQ ID NO: 457 - protein, 113 aa, synthetic construct; identical to SEQ ID NO: 438
  REGION 1..113: note = Synthetic construct

SEQ ID NO: 458 - protein, 113 aa, synthetic construct; identical to SEQ ID NO: 438
  REGION 1..113: note = Synthetic construct

SEQ ID NO: 459 - protein, 113 aa, synthetic construct; identical to SEQ ID NO: 438
  REGION 1..113: note = Synthetic construct

SEQ ID NO: 460 - protein, 75 aa, synthetic construct
  REGION 1..75: note = Synthetic construct
LTWYQQKPGQPPKLLIYWGSTRQSGVPARFSGSGSETDFTLTISSLQAEDVAVYYCQHFYSNPPTFGPGTTVAIK

SEQ ID NO: 461 - protein, 113 aa, synthetic construct
  REGION 1..113: note = Synthetic construct
DIVMTQSPDSLAVSLGERATINCKSSQSVLYTSNNKNYLAWYQQKPGQLPKLLIYWASIRQSGVPDRFSGSGSETDFTLTISSLQAEDVAVYYCQHFYSNPPTFGPGTTVAIK

SEQ ID NO: 462 - protein, 113 aa, synthetic construct; identical to SEQ ID NO: 438
  REGION 1..113: note = Synthetic construct

SEQ ID NO: 463 - protein, 113 aa, synthetic construct
  REGION 1..113: note = Synthetic construct
DIVMTQSPDSLAVSLGERATINCKSSQSVLYTYNNKNYLAWYQQKPGQPPKLLIYWASIRQSGVPDRFSGSGSETDFTLTISSLQAEDVAVYYCQHFYSNPPTFGPGTTVAIK

SEQ ID NO: 464 - protein, 113 aa, synthetic construct; identical to SEQ ID NO: 438
  REGION 1..113: note = Synthetic construct

SEQ ID NO: 465 - protein, 113 aa, synthetic construct
  REGION 1..113: note = Synthetic construct
DIVMTQSPDSLAVSLGERATINCKSSQSVLYTSNNKNYLAWYQQKPGQPPKLLIYWASIRQSGVPDRFSGSGSETDFTRTISSLQAEDVAVYYCQHFYSNPPTFGPGTTVAIK

SEQ ID NO: 466 - protein, 113 aa, synthetic construct
  REGION 1..113: note = Synthetic construct
DVVMTQSPDSLAVSLGERATINCKSSQSVFDSSDKRNYLAWYQKKPGQPPKLIIYWASTRESGVPARFSGSGSGTDFTLTISSLQAEDVAVYYCQHFYSNPPTFGPGTTVAIK

SEQ ID NO: 467 - protein, 113 aa, synthetic construct
  REGION 1..113: note = Synthetic construct
DIVMTPSPDSLAVSLGERATINCKSSQSVLYTSNNKNYLAWYQQKPGQPPKLLIYWASIRQSGVPDRFSGSGSETDFTLTISSLQAEDVAVYYCQHFYSNPPTFGPGTTVAIK

SEQ ID NO: 468 - protein, 113 aa, synthetic construct; identical to SEQ ID NO: 438
  REGION 1..113: note = Synthetic construct

SEQ ID NO: 469 - protein, 113 aa, synthetic construct
  REGION 1..113: note = Synthetic construct
DIVMTQSPDSLAVSLGERATINCKSSQSVLYTSNNKNYLAWYQQKPGQPPKLLIYWASIRQSGVPDRFSGSGSETDFTLTISSLQAEDVAVYFCQHFYSNPPTFGPGTTVAIK

SEQ ID NO: 470 - protein, 113 aa, synthetic construct; identical to SEQ ID NO: 438
  REGION 1..113: note = Synthetic construct

SEQ ID NO: 471 - protein, 113 aa, synthetic construct
  REGION 1..113: note = Synthetic construct
DIVMTQSPDSLAVSLGERATINCKSSQSVLYSSNNKNYLAWYQQKPGQPPKLLIYWASIRQSGVPDRFSGSGSETDFTLTISSLQAEDVAVYYCQHFYSNPPTFGPGTTVAIK

SEQ ID NO: 472 - protein, 108 aa, synthetic construct; identical to SEQ ID NO: 447
  REGION 1..108: note = Synthetic construct

SEQ ID NO: 473 - protein, 113 aa, synthetic construct; identical to SEQ ID NO: 438
  REGION 1..113: note = Synthetic construct

SEQ ID NO: 474 - protein, 113 aa, synthetic construct; identical to SEQ ID NO: 438
  REGION 1..113: note = Synthetic construct

SEQ ID NO: 475 - protein, 113 aa, synthetic construct; identical to SEQ ID NO: 438
  REGION 1..113: note = Synthetic construct

SEQ ID NO: 476 - protein, 58 aa, synthetic construct
  REGION 1..58: note = Synthetic construct
WASIRQSGVADRFSGSGSETDFTLTISSLQAEDVAVYYCQHFYSNPPTFGPGTTVAIK

SEQ ID NO: 477 - protein, 113 aa, synthetic construct; identical to SEQ ID NO: 438
  REGION 1..113: note = Synthetic construct

SEQ ID NO: 478 - protein, 53 aa, synthetic construct
  REGION 1..53: note = Synthetic construct
WASIRQSGVADRFSGSGSETDFTLTISSLQAEDVAVYYCQHFYSNPPTFGPGT

SEQ ID NO: 479 - protein, 113 aa, synthetic construct
  REGION 1..113: note = Synthetic construct
DIVMTQSPDSLAVSLGERATINCKSSQSVLYTSNNKNYLAWYQQKPGQPPKLLIYWASIRQSGVPDRFSRSGSETDFTLTISSLQAEDVAVYYCQHFYSNPPTFGPGTTVAIK

SEQ ID NO: 480 - protein, 113 aa, synthetic construct; identical to SEQ ID NO: 438
  REGION 1..113: note = Synthetic construct

SEQ ID NO: 481 - protein, 108 aa, synthetic construct
  REGION 1..108: note = Synthetic construct
DIVMTQSPDSLAVSLGERATINCKSSQCVLYTSNNKNYLAWYQQKPGQPPKLLIYWASIRQSGVPDRFSGSGSETYFTLTISSLQAEDVAVYYCQHFYSNPPTFGPGT

SEQ ID NO: 482 - protein, 113 aa, synthetic construct
  REGION 1..113: note = Synthetic construct
DIVMTQSPDSLAVSLGERATINCKSSQSVLYTSNNKNYLAWYQQKPGQPPKLLIYWASIRQSGVPDRFSGSVSETDFTLTISSLQAEDVAVYYCQHFYSNPPTFGPGTTVAIK

SEQ ID NO: 483 - protein, 113 aa, synthetic construct; identical to SEQ ID NO: 438
  REGION 1..113: note = Synthetic construct

SEQ ID NO: 484 - protein, 113 aa, synthetic construct
  REGION 1..113: note = Synthetic construct
DIVMTQSPDSLAVSLGERATINCKSSQSVLYTTNNKNYLAWYQQKPGQPPKLLIYWASIRQSGVPDRFSGSGSETDFTLTISSLQAEDVAVYYCQHFYSNPPTFGPGTTVAIK

SEQ ID NO: 485 - protein, 113 aa, synthetic construct
  REGION 1..113: note = Synthetic construct
DIVMTQSPDSLAVSLGERATINCKSSQSVLYTSNNKNYLAWYQQKPGQPPKLLIYWASIRQSGVPDRFSGSGSETDFTLTISSLQAEDVAVYCCQHFYSNPPTFGPGTTVAIK

SEQ ID NO: 486 - protein, 113 aa, synthetic construct
  REGION 1..113: note = Synthetic construct
DIVMTQSPDSLAVSLGKRATINCKSSQSVLYTSNNKNYLAWYQQKPGQPPKLLIYWASIRQSGVPDRFSGSGSETDFTLTISGLQAEDVAVYYCQHFYSNPPTFGPGTTVAIK

SEQ ID NO: 487 - protein, 58 aa, synthetic construct; identical to SEQ ID NO: 476
  REGION 1..58: note = Synthetic construct

SEQ ID NO: 488 - protein, 113 aa, synthetic construct; identical to SEQ ID NO: 438
  REGION 1..113: note = Synthetic construct

SEQ ID NO: 489 - protein, 113 aa, synthetic construct; identical to SEQ ID NO: 438
  REGION 1..113: note = Synthetic construct

SEQ ID NO: 490 - protein, 113 aa, synthetic construct
  REGION 1..113: note = Synthetic construct
DIVMTQSPDSLAVSLGERATINCKSSQSVLYNSNNKNYLAWYQQKPGQPPKLLIYWASIRQSGVPDRFSGSGSETDFTLTISSLQAEDVAVYYCQHFYSNPPTFGPGTTVAIK

SEQ ID NO: 491 - protein, 113 aa, synthetic construct
  REGION 1..113: note = Synthetic construct
DIVMTQSPDSLAVSLGERATINCKSSQSVLYTSNNKNYLAWYQQKPGQPPKLLSYWASIRQSGVPDRFSGSGSETDFTLTISSLQAEDVAVYYCQHFYSNPPTFGPGTTVAIK

SEQ ID NO: 492 - protein, 113 aa, synthetic construct
  REGION 1..113: note = Synthetic construct
DIVMTQSPDSLAVSLGERATINCKSSQSVLYTSNIKNYLAWYQQKPGQPPKLLIYWASIRQSGVPDRFSGSGSETDFTLTISSLQAEDVAVYYCQHFYSNPPTFGPGTTVAIK

SEQ ID NO: 493 - protein, 113 aa, synthetic construct; identical to SEQ ID NO: 438
  REGION 1..113: note = Synthetic construct

SEQ ID NO: 494 - protein, 113 aa, synthetic construct
  REGION 1..113: note = Synthetic construct
DIVMTQSPDSLAVSLGERATINCKSSQSVLYTSNNKNYLAWYQQRPGQPPKLLIYWASIRQSGVPDRFSGSGSETDFTLTISSLQAEDVAVYYCQHFYSNPPTFGPGTTVAIK

SEQ ID NO: 495 - protein, 113 aa, synthetic construct; identical to SEQ ID NO: 438
  REGION 1..113: note = Synthetic construct

SEQ ID NO: 496 - protein, 113 aa, synthetic construct; identical to SEQ ID NO: 438
  REGION 1..113: note = Synthetic construct

SEQ ID NO: 497 - protein, 113 aa, synthetic construct
  REGION 1..113: note = Synthetic construct
DFVMTQSPDSLAVSLGERATINCKSSQSVLYTSNNKNYLAWYQQKPGQPPKLLIYWASIRQSGVPDRFSGSGSETDFTLTISSLQAEDVAVYYCQHFYSNPPTFGPGTTVAIK

SEQ ID NO: 498 - protein, 113 aa, synthetic construct; identical to SEQ ID NO: 438
  REGION 1..113: note = Synthetic construct

SEQ ID NO: 499 - protein, 113 aa, synthetic construct
  REGION 1..113: note = Synthetic construct
DIVMTQSPDSLAVSLGERATINCKSSQSVLYTSNNKNYLAWYQQKPGQPPKLLIYWASIRQSGVPDRFSGSGSETDFTLTISSLQAEGVAVYYCQHFYSNPPTFGPGTTVAIK

SEQ ID NO: 500 - protein, 113 aa, synthetic construct
  REGION 1..113: note = Synthetic construct
DIVMTQSPDSLAVSLGERATINCKSSQSVLYTSNNKNYLAWYQQKPGQPPKLLIYWASIRQSGAPDRFSGSGSETDFTLTISSLQAEDVAVYYCQHFYSNPPTFGPGTTVAIK

SEQ ID NO: 501 - protein, 113 aa, synthetic construct; identical to SEQ ID NO: 438
  REGION 1..113: note = Synthetic construct

SEQ ID NO: 502 - protein, 108 aa, synthetic construct; identical to SEQ ID NO: 447
  REGION 1..108: note = Synthetic construct

SEQ ID NO: 503 - protein, 108 aa, synthetic construct; identical to SEQ ID NO: 447
  REGION 1..108: note = Synthetic construct

SEQ ID NO: 504 - protein, 113 aa, synthetic construct; identical to SEQ ID NO: 438
  REGION 1..113: note = Synthetic construct

SEQ ID NO: 505 - protein, 113 aa, synthetic construct; identical to SEQ ID NO: 438
  REGION 1..113: note = Synthetic construct

SEQ ID NO: 506 - protein, 113 aa, synthetic construct; identical to SEQ ID NO: 438
  REGION 1..113: note = Synthetic construct

SEQ ID NO: 507 - protein, 113 aa, synthetic construct
  REGION 1..113: note = Synthetic construct
DIVMTQSPDSLAVSLGERATINCKSSQSILYSFNNRNSLAWYQQKPGQPPKLLIYWASTRESGVPDRFSGSGSGTDFTLTISSLQAEDVAVYYCQHFYSNPPTFGPGTTVAIK

SEQ ID NO: 508 - protein, 108 aa, synthetic construct; identical to SEQ ID NO: 447
  REGION 1..108: note = Synthetic construct

SEQ ID NO: 509 - protein, 108 aa, synthetic construct; identical to SEQ ID NO: 447
  REGION 1..108: note = Synthetic construct

SEQ ID NO: 510 - protein, 113 aa, synthetic construct
  REGION 1..113: note = Synthetic construct
DIVMTQSPDSLAVFLGERATINCKSSQSVLYTSNNKNYLAWYQQKPGQPPKLLIYWASIRQSGVPDRFSGSRSETDFTLTISSLQAEDVAVYYCQHFYSNPPTFGPGTTVAIK

SEQ ID NO: 511 - protein, 113 aa, synthetic construct
  REGION 1..113: note = Synthetic construct
DIVLTQSPDSLALSLGERATINCKSSQTVLYSSNRKDYLAWYQQKPGQPPKLLIYWASTRESGVPDRFSGGGSGTDFTHTISNLQAEDVAVYYCQHFYSNPPTFGPGTTVAIK

SEQ ID NO: 512 - protein, 113 aa, synthetic construct
  REGION 1..113: note = Synthetic construct
DIVMTQSPDSLAVSLGARATINCKSSQSVLYTSNNKNYLAWYQQKPGQPPKLLIYWASIRQSGVPDRFSGSGSETDFTLTISSLQAEDVAVYYCQHFYSNPPTFGPGTTVAIK

SEQ ID NO: 513 - protein, 113 aa, synthetic construct; identical to SEQ ID NO: 438
  REGION 1..113: note = Synthetic construct

SEQ ID NO: 514 - protein, 113 aa, synthetic construct; identical to SEQ ID NO: 438
  REGION 1..113: note = Synthetic construct

SEQ ID NO: 515 - protein, 113 aa, synthetic construct; identical to SEQ ID NO: 438
  REGION 1..113: note = Synthetic construct

SEQ ID NO: 516 - protein, 113 aa, synthetic construct; identical to SEQ ID NO: 438
  REGION 1..113: note = Synthetic construct

SEQ ID NO: 517 - protein, 113 aa, synthetic construct; identical to SEQ ID NO: 438
  REGION 1..113: note = Synthetic construct

SEQ ID NO: 518 - protein, 113 aa, synthetic construct; identical to SEQ ID NO: 438
  REGION 1..113: note = Synthetic construct

SEQ ID NO: 519 - protein, 113 aa, synthetic construct; identical to SEQ ID NO: 438
  REGION 1..113: note = Synthetic construct

SEQ ID NO: 520 - protein, 113 aa, synthetic construct
  REGION 1..113: note = Synthetic construct
DIVMTQSPDSLAVSLGERATINCKSSQSVLYTSNNKNYLARYQQKPGQPPKLLIYWASIRQSGVPDRFSGSGSETDFTLTISSLQAEDVAVYYCQHFYSNPPTFGPGTTVAIK

SEQ ID NO: 521 - protein, 113 aa, synthetic construct; identical to SEQ ID NO: 438
  REGION 1..113: note = Synthetic construct

SEQ ID NO: 522 - protein, 113 aa, synthetic construct; identical to SEQ ID NO: 438
  REGION 1..113: note = Synthetic construct

SEQ ID NO: 523 - protein, 113 aa, synthetic construct; identical to SEQ ID NO: 438
  REGION 1..113: note = Synthetic construct

SEQ ID NO: 524 - protein, 113 aa, synthetic construct
  REGION 1..113: note = Synthetic construct
DIVMTQSPDSLAVSLGERATINCKSNQSVLYTSNNKNYLAWYQQKPGQPPKLLIYWASIRQSGVPDRFSGSGSETDFTLTISSLQAEDVAVYYCQHFYSNPPTFGPGTTVAIK

SEQ ID NO: 525 - protein, 113 aa, synthetic construct; identical to SEQ ID NO: 438
  REGION 1..113: note = Synthetic construct

SEQ ID NO: 526 - protein, 113 aa, synthetic construct; identical to SEQ ID NO: 438
  REGION 1..113: note = Synthetic construct

SEQ ID NO: 527 - protein, 113 aa, synthetic construct; identical to SEQ ID NO: 438
  REGION 1..113: note = Synthetic construct

SEQ ID NO: 528 - protein, 113 aa, synthetic construct; identical to SEQ ID NO: 438
  REGION 1..113: note = Synthetic construct

SEQ ID NO: 529 - protein, 113 aa, synthetic construct; identical to SEQ ID NO: 438
  REGION 1..113: note = Synthetic construct

SEQ ID NO: 530 - protein, 113 aa, synthetic construct; identical to SEQ ID NO: 438
  REGION 1..113: note = Synthetic construct

SEQ ID NO: 531 - protein, 113 aa, synthetic construct; identical to SEQ ID NO: 438
  REGION 1..113: note = Synthetic construct

SEQ ID NO: 532 - protein, 113 aa, synthetic construct
  REGION 1..113: note = Synthetic construct
DIVMTQSPDSLAVSLGEMATINCKSSQSVLYTSNNKNYLAWYQQKPGQPPKLLIYWASIRQSGVPDRFSGSGSETDFTLTISSLQAEDVAVYYCQHFYSNPPTFGPGTTVAIK

SEQ ID NO: 533 - protein, 113 aa, synthetic construct; identical to SEQ ID NO: 438
  REGION 1..113: note = Synthetic construct

SEQ ID NO: 534 - protein, 113 aa, synthetic construct
  REGION 1..113: note = Synthetic construct
DIVMTQSPDSLAVSLGERATINCKSSQSVLYTSNNKNYLAWYQQKPGQPPKLLIYWASIRQSGVPDRFSGSGSETDFTLTISSLQAEYVAVYYCQHFYSNPPTFGPGTTVAIK

SEQ ID NO: 535 - protein, 113 aa, synthetic construct; identical to SEQ ID NO: 438
  REGION 1..113: note = Synthetic construct

SEQ ID NO: 536 - protein, 113 aa, synthetic construct; identical to SEQ ID NO: 438
  REGION 1..113: note = Synthetic construct

SEQ ID NO: 537 - protein, 113 aa, synthetic construct; identical to SEQ ID NO: 438
  REGION 1..113: note = Synthetic construct

SEQ ID NO: 538 - protein, 113 aa, synthetic construct; identical to SEQ ID NO: 438
  REGION 1..113: note = Synthetic construct

SEQ ID NO: 539 - protein, 113 aa, synthetic construct; identical to SEQ ID NO: 438
  REGION 1..113: note = Synthetic construct

SEQ ID NO: 540 - protein, 113 aa, synthetic construct; identical to SEQ ID NO: 438
  REGION 1..113: note = Synthetic construct

SEQ ID NO: 541 - protein, 113 aa, synthetic construct; identical to SEQ ID NO: 438
  REGION 1..113: note = Synthetic construct

SEQ ID NO: 542 - protein, 113 aa, synthetic construct; identical to SEQ ID NO: 438
  REGION 1..113: note = Synthetic construct

SEQ ID NO: 543 - protein, 113 aa, synthetic construct; identical to SEQ ID NO: 438
  REGION 1..113: note = Synthetic construct

SEQ ID NO: 544 - protein, 113 aa, synthetic construct; identical to SEQ ID NO: 471
  REGION 1..113: note = Synthetic construct

SEQ ID NO: 545 - protein, 113 aa, synthetic construct; identical to SEQ ID NO: 438
  REGION 1..113: note = Synthetic construct

SEQ ID NO: 546 - protein, 113 aa, synthetic construct
  REGION 1..113: note = Synthetic construct
DIVMTQSPDSLAVSLGERATINCKSSQSVLYTSNNKNYLAWYQQKPGQPPKLLIYWASIRQSGVPDRFSGSGSETDFTLTISSLEAEDVAVYYCQHFYSNPPTFGPGTTVAIK

SEQ ID NO: 547 - protein, 113 aa, synthetic construct
  REGION 1..113: note = Synthetic construct
DIVMTQSPDSLAVSLGERATINCKSSQSVLYTSNNKNYLAWYQQKPGQPPKLLIYWASIRQSGVPDRISGSGSVTAFTPTISSLQAEDVAVYYCQHFYSNPPTFGPGTTVAIK

SEQ ID NO: 548 - protein, 113 aa, synthetic construct
  REGION 1..113: note = Synthetic construct
DIVMTQSPDSLAVSLGERATINCKSSQSVLYTSNNKNYLAWYQQKPGQPPKLLFYWASIRQSGVPDRFSGSGSETDFTLTISSLQAEDVAVYYCQHFYSNPPTFGPGTTVAIK

SEQ ID NO: 549 - protein, 113 aa, synthetic construct; identical to SEQ ID NO: 438
  REGION 1..113: note = Synthetic construct

SEQ ID NO: 550 - protein, 113 aa, synthetic construct
  REGION 1..113: note = Synthetic construct
DIVMTQSPDSLAVSLGERATINCKSSQSVLYTSKNKNYLAWYQQKPGQPPKLLIYWASIRQSGVPDRFSGSGSETDFTLTISSLQAEDVAVYYCQHFYSNPPTFGPGTTVAIK

SEQ ID NO: 551 - protein, 113 aa, synthetic construct
  REGION 1..113: note = Synthetic construct
DIVMTQSPDSLAVSLGERATINCKSSQSVLYTSNNKNHLAWYQQKPGQPPKLLIYWASIRQSGVPDRFSGSGSETDFTLTISSLQAEDVAVYYCQHFYSNPPTFGPGTTVAIK

SEQ ID NO: 552 - protein, 113 aa, synthetic construct
  REGION 1..113: note = Synthetic construct
DIVMTQSPDSLAVSLGERATINCKSSQSVLYTSDNKNYLAWYQQKPGQPPKLLIYWASIRQSGVPDRFSGSGSETDFTLTISSLQAEDVAVYYCQHFYSNPPTFGPGTTVAIK

SEQ ID NO: 553 - protein, 113 aa, synthetic construct; identical to SEQ ID NO: 438
  REGION 1..113: note = Synthetic construct

SEQ ID NO: 554 - protein, 113 aa, synthetic construct
  REGION 1..113: note = Synthetic construct
DVVMTQSPDSLAVSLGERATINCKSSQSVLYTSNNKNYLAWYQQKPGQPPKLLIYWASIRQSGVPDRFSGSGSETDFTLTISSLQAEDVAVYYCQHFYSNPPTFGPGTTVAIK

SEQ ID NO: 555 - protein, 113 aa, synthetic construct; identical to SEQ ID NO: 438
  REGION 1..113: note = Synthetic construct

SEQ ID NO: 556 - protein, 113 aa, synthetic construct
  REGION 1..113: note = Synthetic construct
DIVMIQSPDSLAVSLGERATINCKSSQSVLYTSNNKNYLAWYQQKPGQPPKLLIYSASIRQSGVPDRFSGSGSETDFTLTISSLQAEDVAVYYCQHFYSNPPTFGPGTTVAIK

SEQ ID NO: 557 - protein, 113 aa, synthetic construct
  REGION 1..113: note = Synthetic construct
DIVMTQSPDSLAVSLGERATINCKSSQSVLYTSNNKYYLAWYQQKPGQPPKLLIYWASIRQSGVPDRFSGSGSETDFTLTISSLQAEDVAVYYCQHLYSNPPTFGPGTTVAIK

SEQ ID NO: 558 - protein, 113 aa, synthetic construct
  REGION 1..113: note = Synthetic construct
DIVMTQSPDSLAVSLGERATINCKSSQSVLYTSNNKNYLAWYQQKPGQPPKLLIYWASIRQSGVPDRFSGSGSETDFTLTISSLQAEDVAVYYCQHFYSNPPTYGPGTTVAIK

SEQ ID NO: 559 - protein, 113 aa, synthetic construct
  REGION 1..113: note = Synthetic construct
DIVMTQSPDSLAVSLGERATINCKSSQSVLYTSNNKNYLAWYQQKPGQPPKLLIYWASIRQSGVPDRFSGSGSETDFTLTISSLQAEDVAVYYCQHFYTNPPTFGPGTTVAIK

SEQ ID NO: 560 - protein, 113 aa, synthetic construct
  REGION 1..113: note = Synthetic construct
DIVMTQSPDSLAVSLGERATINCKSSQSVLYTSNNKNYLAWYQQKPGQPPKLLIYWASIRQSGVPDRFSGSGSETDFTLAISSLQAEDVAVYYCQHFYTNPPTFGPGTTVAIK

SEQ ID NO: 561 - protein, 113 aa, synthetic construct
  REGION 1..113: note = Synthetic construct
DIVMTQSPDSPAVSLGERATINCKSSQSVLYTSNNKNYLAWYQQKPGQPPKLLIYWASIRQSGVPDRFSGSGSETDFTLTISSLQAEDVAVYYCQHFYTNPPTFGPGTTVAIK

SEQ ID NO: 562 - protein, 113 aa, synthetic construct; identical to SEQ ID NO: 559
  REGION 1..113: note = Synthetic construct

SEQ ID NO: 563 - protein, 108 aa, synthetic construct
  REGION 1..108: note = Synthetic construct
DIVMTQSPDSLAVSLGERATINCKSSQSVLYTSNNKNYLAWYQQKPGQPPKLLIYWASIRQSGVPDRFSGSGSETDFTLTISSLQAEDVAVYYCQHFYTNPPTFGPGT

SEQ ID NO: 564 - protein, 113 aa, synthetic construct
  REGION 1..113: note = Synthetic construct
DIVMTQSPDSLAVSLGERATINCKSSQSVLYTSNNKNYFAWYQQKPGQPPKLLIYWASIRQSGVPDRFSGSGSETDFTLTISSLQAEDVAVYYCQHFYTNPPTFGPGTTVAIK

SEQ ID NO: 565 - protein, 113 aa, synthetic construct
  REGION 1..113: note = Synthetic construct
DIVMTQSPDSLAVSLGEGATINCKSSQSVLYTSNNKNYLAWYQQKPGQPPKLLIYWASIRQSGVPDRFSGSGSETDFTLTISSLQAEDVAVYYCQHFYTNPPTFGPGTTVAIK

SEQ ID NO: 566 - protein, 113 aa, synthetic construct; identical to SEQ ID NO: 559
  REGION 1..113: note = Synthetic construct

SEQ ID NO: 567 - protein, 113 aa, synthetic construct; identical to SEQ ID NO: 559
  REGION 1..113: note = Synthetic construct

SEQ ID NO: 568 - protein, 113 aa, synthetic construct; identical to SEQ ID NO: 559
  REGION 1..113: note = Synthetic construct

SEQ ID NO: 569 - protein, 113 aa, synthetic construct; identical to SEQ ID NO: 559
  REGION 1..113: note = Synthetic construct

SEQ ID NO: 570 - protein, 113 aa, synthetic construct
  REGION 1..113: note = Synthetic construct
DIVMTQSPDSLAVSLGERATINCKSSQSVLYTSNNKNYLAWYQQKPGQPPKLLIYWVSIRQSGVPDRFSGSGSETDFTLTISSLQAEDVAVYYCQHFYTNPPTFGPGTTVAIK

SEQ ID NO: 571 - protein, 113 aa, synthetic construct
  REGION 1..113: note = Synthetic construct
DIVMTQSPDSLAVSLGERATINCKSSQSVLYTSNNKNYLAWYQQKPGQPPKLLIYWASIRQCGVPDRFSGSGSETDFTLTISSLQAEDVAVYYCQHFYTNPPTFGPGTTVAIK

SEQ ID NO: 572 - protein, 113 aa, synthetic construct; identical to SEQ ID NO: 559
  REGION 1..113: note = Synthetic construct

SEQ ID NO: 573 - protein, 113 aa, synthetic construct; identical to SEQ ID NO: 559
  REGION 1..113: note = Synthetic construct

SEQ ID NO: 574 - protein, 113 aa, synthetic construct
  REGION 1..113: note = Synthetic construct
DIAMTQSPDSLAVSLGERATINCKSSQSVLYTSKNKNYLAWYQQKPGQPPKLLIYWASIRQSGVPDRFSGSGSETDFTLTISSLQAEDVAVYYCQHFYSDPPTFGPGTTVAIK

SEQ ID NO: 575 - protein, 113 aa, synthetic construct
  REGION 1..113: note = Synthetic construct
DIVMTQSPDSLAVSLGERATINCKSSQSVLYTSNNKNYLAWYQQKPGQPPKLLIYWASIRQSGVPDRFSGSGSETDFTLTISSLQAEDVAVYYCQHFYSKPPTFGPGTTVAIK

SEQ ID NO: 576 - protein, 112 aa, synthetic construct; identical to SEQ ID NO: 119
  REGION 1..112: note = Synthetic construct

SEQ ID NO: 577 - protein, 85 aa, synthetic construct
  REGION 1..85: note = Synthetic construct
SLLHNNEHNYLDWYLQKPGQSPQLLIYLGSNRASGVPDRFSGSGSGTDFTLKISRVEAEDVGIYYCMQPLQTPRTFGQGTKVDIK

SEQ ID NO: 578 - protein, 112 aa, synthetic construct
  REGION 1..112: note = Synthetic construct
DIVMTQSPLSLPVTPGEPASISCRSSQSLLHSNGYNYLDWYLQKPGQSPQLLIYLGSNRASGVPDRFSGSGSGTDFTLKISRVEAEDVGVYYCMQPLQTPRTFGQGTRLEIK

SEQ ID NO: 579 - protein, 85 aa, synthetic construct
  REGION 1..85: note = Synthetic construct
SLLHNNEHNYLDWYLQKPGQSPQLLIYLASNRASGVPDRFSGSGSGTDFTLKISRVEAEDVGIYYCMQPLQTPRTFGQGTKVDIK

SEQ ID NO: 580 - protein, 86 aa, synthetic construct
  REGION 1..86: note = Synthetic construct
QSLLHRNGCNYLHWYLQKPGQSPQLLIYLGSNRASGVPDRFSGSGSGTDFTLKISRVEAEDIGVYYCMQPLQTPRTFGQGTKLEIK

SEQ ID NO: 581 - protein, 112 aa, synthetic construct
  REGION 1..112: note = Synthetic construct
DIVLTQSPLSLPVTPGEPASISCRSSQSLLSNNGYNYLDWYLQRPGQSPQLLIYLGSNRASGVPDRFSGSGSGTDFTLKISRVEAEDVGVYYCMQPLQTPRTFGQGTRLEIK

SEQ ID NO: 582 - protein, 112 aa, synthetic construct
  REGION 1..112: note = Synthetic construct
DIVMTQSPLSLPVTPGEPASISCRSSQSLLHSNGYNYLDWYLQKPGQSPQLLIYLGSNRASGVPDRFSGSGSGTDFTLKISRVEAEDVGVYYCMQPLQTPRTFGQGTKLEIK

SEQ ID NO: 583 - protein, 112 aa, synthetic construct
  REGION 1..112: note = Synthetic construct
DIVLTQSPLSLPVTPGEPASISCRSSQSLLNSNGYNYLDWYLQKPGQSPQLLIYLGSNRASGVPDRFSGSGPGTDFTLKIRRVEAEDVGVYYCMQPLQTPRTFGQGTRLEIK

SEQ ID NO: 584 - protein, 112 aa, synthetic construct
  REGION 1..112: note = Synthetic construct
DIVLTQSPLSLPVTPGEPTSISCRSSQSLLHSNRYNYLDWYLQRPGQSPQLLIYLGSNRASGVPDRFSGSGSGTDFTLKISRVEAEDVGIYYCMQPLQTPGTFGQGIKVEIK

SEQ ID NO: 585 - protein, 112 aa, synthetic construct
  REGION 1..112: note = Synthetic construct
DIMMIQSPLSLPVTPGEPASISCRSSESLLHSSGYNYLGWYVQKPGQSPQLLIYLASNRASGVPDRFNGSGSGTDFTLRISRVEAEDVGVYYCMQPLQRPCTFGQGTRLEIK

SEQ ID NO: 586 - protein, 112 aa, synthetic construct
  REGION 1..112: note = Synthetic construct
DIVMTQSPLSLPVTPGEPASISCRSSQSLLHSNGNNYLDWYLQKPGQSPQLLIYLGSNRASGVPDRFSGSGSGTDFTLKISRVEAEDVGVYYCMQPLQTPKTFGQGTKVEIK

SEQ ID NO: 587 - protein, 86 aa, synthetic construct
  REGION 1..86: note = Synthetic construct
QSLLHSNGYNYLDWYLQKPGQSPQLLIYLGSNRVSGVPDRFSGSGSGTDFTLKISRVEAEDVGVYYCMQPLQTPKTFGQGTKVEIK

SEQ ID NO: 588 - protein, 112 aa, synthetic construct
  REGION 1..112: note = Synthetic construct
DIVMTQSPLSLPVTPGESASISCRSSQSLLHSNGNNYLDWYLQKPGQSPQLLIYLGSNRASGVPDRFSGSGSGTDFTLKISRVEAEDVGVYYCMQPLQTPKTFGQGTKVEIK

SEQ ID NO: 589 - protein, 86 aa, synthetic construct; identical to SEQ ID NO: 587
  REGION 1..86: note = Synthetic construct

SEQ ID NO: 590 - protein, 112 aa, synthetic construct; identical to SEQ ID NO: 121
  REGION 1..112: note = Synthetic construct

SEQ ID NO: 591 - protein, 112 aa, synthetic construct; identical to SEQ ID NO: 122
  REGION 1..112: note = Synthetic construct

SEQ ID NO: 592 - protein, 112 aa, synthetic construct; identical to SEQ ID NO: 122
  REGION 1..112: note = Synthetic construct

SEQ ID NO: 593 - protein, 112 aa, synthetic construct; identical to SEQ ID NO: 124
  REGION 1..112: note = Synthetic construct

SEQ ID NO: 594 - protein, 86 aa, synthetic construct
  REGION 1..86: note = Synthetic construct
QSLLHSNGYNYLDWYLQKPGQPPQLLIYLGSNRASGVPDGFSGSGSGTDFTLKISRVEAEDVGVYYCMQPLQIPGTFGQGTKVEIK

SEQ ID NO: 595 - protein, 86 aa, synthetic construct
  REGION 1..86: note = Synthetic construct
QSLLHSNGYTYLDWYLQKPGQSPQLLIYSGSNRASGVPDWFSGSGSGTDFTLKISRVEAEDVGVYYCMQPLQVPQTFGQGTKVEIK

SEQ ID NO: 596 - protein, 112 aa, synthetic construct
  REGION 1..112: note = Synthetic construct
DIVMTQSPLSLPVTPGEPASISCRSSQSLLHSNGYNYLDWYLQKPGQSPQLLIYLGSHRASGVPDRFSGSASGRDFTLKISRVEAEDVGVYYCMQPLQTPHTFGQGTKLEIK

SEQ ID NO: 597 - protein, 112 aa, synthetic construct
  REGION 1..112: note = Synthetic construct
DIVMTQSPLSLPVTPGEPASISCRSSQSLLHSNGYNYLDWYLQKPGQSPQLLIYLGSNWASGVPDRFSGSGSGTDFTLKISRVEAEDVGVYYCMPPLQTPYTFGQGTKLEIK

SEQ ID NO: 598 - protein, 109 aa, synthetic construct
  REGION 1..109: note = Synthetic construct
DIVMTQSPLSLPVIPGEPASISCRSSQSLLHSNGYNYLDWYLQKPGQSPQLLIYLGSNRASGVPDRFSGGGSGTDFTLKISRVEAEDVGVYYCMQPLQIPTTFGQGTKV

SEQ ID NO: 599 - protein, 109 aa, synthetic construct
  REGION 1..109: note = Synthetic construct
EIVMTQSPLSLPVTPGEPASISCRSSQSLLYSNGYNYLDWYVQKPGQSPHLLIYFASYRASGVPDRFSGSGSGTNFTLKISRVEAEDVGVYYCMQPLQIPTTFGQGTKV

SEQ ID NO: 600 - protein, 111 aa, synthetic construct
  REGION 1..111: note = Synthetic construct
DIVLTQSPLSLPVTPGEPASISCRSSQSLLHSNGYNYLHWYLQKPGQSPQLLICLGSNRASGVPDRFSGSGSGTSFTLKISRVEAEDVGVYYCKQPLQHPYTFGQGTKLEI

SEQ ID NO: 601 - protein, 111 aa, synthetic construct
  REGION 1..111: note = Synthetic construct
DIVLTQSPLSLPVTPGEPASISCRSSQSLLHSNGYNYLHWYLQKPGQSPQLLIYLGSNRASGVPDRFSGSGSGTSFTLKISRVEAEDVGVYYCKQPLQHPYTFGQGTKLEI

SEQ ID NO: 602 - protein, 112 aa, synthetic construct
  REGION 1..112: note = Synthetic construct
DIVMTQSPLSLPVAPGEPASISCRSSQSLLHSNGYNYLDWYLQKPGQSPQLLIYLGSNRASGVPDRVSGSGSGTDFTLKISRVEAEDVGVYYCMQFLQHPYTFGQGTKLEIK

SEQ ID NO: 603 - protein, 112 aa, synthetic construct; identical to SEQ ID NO: 223
  REGION 1..112: note = Synthetic construct

SEQ ID NO: 604 - protein, 112 aa, synthetic construct
  REGION 1..112: note = Synthetic construct
DIVMTQSPLSLPVTPGEPASISCRSSQSLLHSNGYNYLDWYLQKPGQSPQLLIYLGSNRASGVPDRFSGSGSGTDFTLKISRVEAEDFGVYYCMQPLQTPYTFGQGTKLEIK

SEQ ID NO: 605 - protein, 112 aa, synthetic construct
  REGION 1..112: note = Synthetic construct
DIVMTQSPFSLPVTPGEPASISCRSSQSLLHSNGYNYLDWYLQKPGQSPQLLIYLGSNRASGVPDRFSGSGSGTDFTLKISRVEAEDVGVYYCMQPLQTPYTFGQGTKLEIK

SEQ ID NO: 606 - protein, 86 aa, synthetic construct
  REGION 1..86: note = Synthetic construct
QSLLHNNGYNYLAWYLQKPGQSPQLLIYLGSNRASGVHDRFSGSGSGTDFTLKISRVKAEDVGVYYCMQPLQTPYTFGQGTKLEIK

SEQ ID NO: 607 - protein, 112 aa, synthetic construct
  REGION 1..112: note = Synthetic construct
DIVMTQSPLSLPVTPGEPASISCRSSQSLLHNDGYNYLAWYLQKPGQSPQLLIYLGSNRASGVPDRFSGSGSGTDFTLKISRVKAEDVGVYYCMQPLQTPYTFGQGTKLEIK

SEQ ID NO: 608 - protein, 112 aa, synthetic construct
  REGION 1..112: note = Synthetic construct
DVVMTQSPLSLPVTLGQPASISCRSSQSLVYSDGNTYLNWFQQRPGQSPRRLIYKVSNRDSGVPDRFSGSGSGTDFTLKISRVEAEDVGVYYCMQPLQTPYTFGQGTKLEIK

SEQ ID NO: 609 - protein, 112 aa, synthetic construct
  REGION 1..112: note = Synthetic construct
DIVMTQSPLSLPVTPGEPASISCRSSQSLLHNNGYNYLAWYLQKPGQSPQLLIYLGSNRASGVPDRFSGSGSGTDFTLKISRVKAEDVGVYYCMQPLQTPYTFGQGTKLEIK

SEQ ID NO: 610 - protein, 112 aa, synthetic construct
  REGION 1..112: note = Synthetic construct
DIVMTQSPLSLPVTPGEPASISCRSSQSLLYSNGYNYLDWYLQKPGQSPQLLIYLGSNRASGVPDRFSGSGSGTDFTLKISRVEAEDVGVYYCMQPLQTPYTFGQGTKLEIK

SEQ ID NO: 611 - protein, 112 aa, synthetic construct; identical to SEQ ID NO: 604
  REGION 1..112: note = Synthetic construct

SEQ ID NO: 612 - protein, 112 aa, synthetic construct
  REGION 1..112: note = Synthetic construct
DIVMTKSPLSLPVTPGEPASISCRSSQSLLHSNGYNYLDWYLQKPGQSPQLLIYLGSNRASGVPDRFSGSGSGTDFTLKISRVEAEDFGVYYCMQPLQTPYTFGQGTKLEIK

SEQ ID NO: 613 - protein, 112 aa, synthetic construct
  REGION 1..112: note = Synthetic construct
DIVMTQSPLSLPVTPGEPASISCRSSQSLLHTSGYNYLDWYLQKPGQSPQLLIYLGSNRASGVPDRFSGSGSGTDFTLNISRVEPEDVGVYYCMQPLQTPYTFGQGTKLEIK

SEQ ID NO: 614 - protein, 111 aa, synthetic construct
  REGION 1..111: note = Synthetic construct
EIVMRQSPLSLPVTPGEAASISCRSSQSLLHGNGHNYLDWYLQKPGQSPQLLIYLGSNRASGVPERFSGSGSGTDFTLKISRVEAEDVGLYYCMQPLQTPYTFGQGTRLEI

SEQ ID NO: 615 - protein, 112 aa, synthetic construct
  REGION 1..112: note = Synthetic construct
DIVMTQSPLSLAVTPGEPASISCRSSQSLLHSNGNNYLDWYLQRPGQSPQLLIYLGSNRASGVPDRFSGSGSDTEFTLKITRVEAEDVGFYYCMQPLQTPYTFGQGTKLEIK

SEQ ID NO: 616 - protein, 112 aa, synthetic construct; identical to SEQ ID NO: 604
  REGION 1..112: note = Synthetic construct

SEQ ID NO: 617 - protein, 112 aa, synthetic construct; identical to SEQ ID NO: 609
  REGION 1..112: note = Synthetic construct

SEQ ID NO: 618 - protein, 112 aa, synthetic construct
  REGION 1..112: note = Synthetic construct
DIVKTQSPLSLPVTPGEPASISCRSSQSLLHSNGYNYLDWYLQKPGQSPQLLIYLGSNRASGVPDRFSGSGSGTDFTLKISRVEAEDFGVYYCMQPLQTPYTFGQGTKLEIK

SEQ ID NO: 619 - protein, 112 aa, synthetic construct
  REGION 1..112: note = Synthetic construct
DIVMTQSPLSLPVTPGEPASISCRSSQGLLHSNGYNYLDWYLQKPGQSPQLLIYLGSNRASGVPDRFSGSGSGTDFTLKISRVEAEDFGVYYCMQPLQTPYTFGQGTKLEIK

SEQ ID NO: 620 - protein, 112 aa, synthetic construct; identical to SEQ ID NO: 604
  REGION 1..112: note = Synthetic construct

SEQ ID NO: 621 - protein, 112 aa, synthetic construct; identical to SEQ ID NO: 604
  REGION 1..112: note = Synthetic construct

SEQ ID NO: 622 - protein, 112 aa, synthetic construct; identical to SEQ ID NO: 609
  REGION 1..112: note = Synthetic construct

SEQ ID NO: 623 - protein, 112 aa, synthetic construct; identical to SEQ ID NO: 609
  REGION 1..112: note = Synthetic construct

SEQ ID NO: 624 - protein, 112 aa, synthetic construct
  REGION 1..112: note = Synthetic construct
DIVMTQSPLSLPVTPGEPASISCRSSQSLLHNNGYNYLAWYLQKPGQSPQLLIYLGSNRASGVPDRFSGSGSGTDFTLKISRMKAEDVGVYYCMQPLQTPYTFGQGTKLEIK

SEQ ID NO: 625 - protein, 112 aa, synthetic construct; identical to SEQ ID NO: 609
  REGION 1..112: note = Synthetic construct

SEQ ID NO: 626 - protein, 112 aa, synthetic construct; identical to SEQ ID NO: 604
  REGION 1..112: note = Synthetic construct

SEQ ID NO: 627 - protein, 20 aa, synthetic construct
  REGION 1..20: note = Synthetic construct
CMQPLQTPYTFGQGTKLEIK

SEQ ID NO: 628 - protein, 112 aa, synthetic construct
  REGION 1..112: note = Synthetic construct
DIVVTQSPLSLPVTPGEPASISCRSSQSLLHSNGYNYLDWYLQKPGQSPQLLIYLGSNRASGVPDRFSGSGSGTDFTLKISRVEAEDFGVYYCMQPLQTPYTFGQGTKLEIK

SEQ ID NO: 629 - protein, 112 aa, synthetic construct; identical to SEQ ID NO: 609
  REGION 1..112: note = Synthetic construct

SEQ ID NO: 630 - protein, 20 aa, synthetic construct
  REGION 1..20: note = Synthetic construct
CMQPLQTPYTFGQGTKLEIK

SEQ ID NO: 631 - protein, 112 aa, synthetic construct; identical to SEQ ID NO: 609
  REGION 1..112: note = Synthetic construct

SEQ ID NO: 632 - protein, 112 aa, synthetic construct
  REGION 1..112: note = Synthetic construct
DIVMTQSPLSLPVTPGEPASISCRSSQSLLHSNGYNYLDWYLQKPGQSPQLLIYLGSNRASGVPDRFSGSGSGTDFTLTISRVEAEDFGVYYCMQPLQTPYTFGQGTKLEIK

SEQ ID NO: 633 - protein, 86 aa, synthetic construct
  REGION 1..86: note = Synthetic construct
QSLLHNNGYNYLAWYLQKPGQSPQLLIYLGSNRASGVPDRFSGSGSGTDFTLKISRVKAEDVGVYYCMQPLQTPYTFGQGTKLEIK

SEQ ID NO: 634 - protein, 112 aa, synthetic construct; identical to SEQ ID NO: 609
  REGION 1..112: note = Synthetic construct

SEQ ID NO: 635 - protein, 112 aa, synthetic construct; identical to SEQ ID NO: 604
  REGION 1..112: note = Synthetic construct

SEQ ID NO: 636 - protein, 112 aa, synthetic construct; identical to SEQ ID NO: 609
  REGION 1..112: note = Synthetic construct

SEQ ID NO: 637 - protein, 112 aa, synthetic construct; identical to SEQ ID NO: 609
  REGION 1..112: note = Synthetic construct

SEQ ID NO: 638 - protein, 112 aa, synthetic construct
  REGION 1..112: note = Synthetic construct
DIVMTQSPLSLPVTPGEPASISCRSSQSLLHNNGYNYLAWYLQKPGQSPQLLIYLGSNRASGVPDRFSGSGSGTAFTLKISRVKAEDVGVYYCMQPLQTPYTFGQGTKLEIK

SEQ ID NO: 639 - protein, 112 aa, synthetic construct; identical to SEQ ID NO: 609
  REGION 1..112: note = Synthetic construct

SEQ ID NO: 640 - protein, 112 aa, synthetic construct; identical to SEQ ID NO: 604
  REGION 1..112: note = Synthetic construct

SEQ ID NO: 641 - protein, 112 aa, synthetic construct; identical to SEQ ID NO: 609
  REGION 1..112: note = Synthetic construct

SEQ ID NO: 642 - protein, 112 aa, synthetic construct
  REGION 1..112: note = Synthetic construct
DIVMTQSPLSLPVTPGEPASISCRSSQSLLHSNGYKYLDWYLQKPGQSPQLLIYLGSNRASGVPDRFSGSGSGTDFTLKISRVEAEDVGVYYCMQPLQTPYTFGQGTKLEIK

SEQ ID NO: 643 - protein, 112 aa, synthetic construct; identical to SEQ ID NO: 609
  REGION 1..112: note = Synthetic construct

SEQ ID NO: 644 - protein, 112 aa, synthetic construct
  REGION 1..112: note = Synthetic construct
DIVMTQSPLSLPVTPGEPASISCRSSQSLLHSNGYNYLDWYLQKPGQSPQLLIYLGSNRASGVPDRFSGSGSGTDFTLKISRVEAEDVGVYYCMQPLQTPYTFGQGTKLEIK

SEQ ID NO: 645 - protein, 112 aa, synthetic construct; identical to SEQ ID NO: 609
  REGION 1..112: note = Synthetic construct

SEQ ID NO: 646 - protein, 112 aa, synthetic construct; identical to SEQ ID NO: 604
  REGION 1..112: note = Synthetic construct

SEQ ID NO: 647 - protein, 112 aa, synthetic construct
  REGION 1..112: note = Synthetic construct
DIVMTQSPLSLPVTPGEPASISCRSSQSLLHNNGYNYLAWYLQKPGQSPQLLFYLGSNRASGVPDRSSGSGSGTDFTLKISRVKAEDVGVYYCMQPLQTPYTFGQGTKLEIK

SEQ ID NO: 648 - protein, 112 aa, synthetic construct
  REGION 1..112: note = Synthetic construct
DIVMTQSPLSLPVTPGEPASISCRSSQSPLHSNGYNYLDWYLQKPGQSPQLLIHLGSNRASGVPARFSGSGSGTDFTLKISRVEAEDFGVYYCMQPLQTPYTFGQGTKLEIK

SEQ ID NO: 649 - protein, 112 aa, synthetic construct; identical to SEQ ID NO: 609
  REGION 1..112: note = Synthetic construct

SEQ ID NO: 650 - protein, 58 aa, synthetic construct
  REGION 1..58: note = Synthetic construct
LGSNRASGVPDRFSGSGSGTDFTLKISRVKAEDVGVYYCMQPLQTPYTFGQGTKLEIK

SEQ ID NO: 651 - protein, 112 aa, synthetic construct; identical to SEQ ID NO: 604
  REGION 1..112: note = Synthetic construct

SEQ ID NO: 652 - protein, 112 aa, synthetic construct; identical to SEQ ID NO: 604
  REGION 1..112: note = Synthetic construct

SEQ ID NO: 653 - protein, 112 aa, synthetic construct; identical to SEQ ID NO: 609
  REGION 1..112: note = Synthetic construct

SEQ ID NO: 654 - protein, 112 aa, synthetic construct; identical to SEQ ID NO: 604
  REGION 1..112: note = Synthetic construct

SEQ ID NO: 655 - protein, 112 aa, synthetic construct; identical to SEQ ID NO: 609
  REGION 1..112: note = Synthetic construct

SEQ ID NO: 656 - protein, 20 aa, synthetic construct
  REGION 1..20: note = Synthetic construct
CMQPLQTPYTFGQGTKLEIK

SEQ ID NO: 657 - protein, 112 aa, synthetic construct; identical to SEQ ID NO: 609
  REGION 1..112: note = Synthetic construct

SEQ ID NO: 658 - protein, 112 aa, synthetic construct
  REGION 1..112: note = Synthetic construct
DVVMTQSPLSLPVTLGQPASISCRSSQSLVHSDGNTYLNWFQQRPGQSPRRLIYKVSNRDSGVPDRFSGSGSGTDFTLKISRVEAEDFGVYYCMQPLQTPYTFGQGTKLEIK

SEQ ID NO: 659 - protein, 112 aa, synthetic construct; identical to SEQ ID NO: 609
  REGION 1..112: note = Synthetic construct

SEQ ID NO: 660 - protein, 112 aa, synthetic construct
  REGION 1..112: note = Synthetic construct
DIVMTQSPLSLPVTPGEPASISCRSSQSLLHNNGYNYLDWYLQKPGQFPQLLIYLGSNRASGVPDRFSGSGSGSDFTLKISRVEAEDVGVYYCMQPLQTPYTFGQGTKLEIK

SEQ ID NO: 661 - protein, 112 aa, synthetic construct; identical to SEQ ID NO: 609
  REGION 1..112: note = Synthetic construct

SEQ ID NO: 662 - protein, 112 aa, synthetic construct; identical to SEQ ID NO: 604
  REGION 1..112: note = Synthetic construct

SEQ ID NO: 663 - protein, 112 aa, synthetic construct; identical to SEQ ID NO: 609
  REGION 1..112: note = Synthetic construct

SEQ ID NO: 664 - protein, 112 aa, synthetic construct; identical to SEQ ID NO: 609
  REGION 1..112: note = Synthetic construct

SEQ ID NO: 665 - protein, 112 aa, synthetic construct; identical to SEQ ID NO: 609
  REGION 1..112: note = Synthetic construct

SEQ ID NO: 666 - protein, 112 aa, synthetic construct; identical to SEQ ID NO: 609
  REGION 1..112: note = Synthetic construct

SEQ ID NO: 667 - protein, 112 aa, synthetic construct
  REGION 1..112: note = Synthetic construct
DIVMTQSPLSLPVTPGEPASISCRPSQSLLHSNGYNYLDWYLQKPGQSPQLLIYLGSNRASGVPDRFSGSGSGTDFTLKISRVEAEDFGVYYCMQPLQTPYTFGQGTKLEIK

SEQ ID NO: 668 - protein, 112 aa, synthetic construct; identical to SEQ ID NO: 609
  REGION 1..112: note = Synthetic construct

SEQ ID NO: 669 - protein, 86 aa, synthetic construct
  REGION 1..86: note = Synthetic construct
QSLLHSNGYNYLDWYLQKPGQSPQLLIYLGSNRASGVPDRFSGSGSGTDFTLKISRVEAEDFGVYYCMQPLQTPYTFGQGTKLEIK

SEQ ID NO: 670 - protein, 111 aa, synthetic construct
  REGION 1..111: note = Synthetic construct
EILMRQSPLSLPVTPGEAASISCRSSQSLLHGNGHNYLDWYLQKPGQSPQLLIYLGSNRASGVPERFSGSGSGTDFTLKISRVEAEDVGLYYCMQPLQTPYTFGQGTRLEI

SEQ ID NO: 671 - protein, 112 aa, synthetic construct
  REGION 1..112: note = Synthetic construct
DIMMTQSLLSLPVTPGEPASISCRSSQSLLHNNGYNYLAWYLQKPGQSPQLLIYLGSNRASGVPDRFSGSGSGTDFTLKISRVKAEDVGVYYCMQPLQTPYTFGQGTKLEIK

SEQ ID NO: 672 - protein, 86 aa, synthetic construct; identical to SEQ ID NO: 669
  REGION 1..86: note = Synthetic construct

SEQ ID NO: 673 - protein, 112 aa, synthetic construct
  REGION 1..112: note = Synthetic construct
DIVMTQSPLSLPVTPGEPASFSCRSSQSLLHNNGYNYLAWYLQKPGQSPQLLIYLGSNRASGVPDRFSGSGSGTDFTLKISRVKAEDVGVYYCMQPLQTPYTFGQGTKLEIK

SEQ ID NO: 674 - protein, 112 aa, synthetic construct
  REGION 1..112: note = Synthetic construct
DIVMTQSPLSLPVTPGEPASISCRSSQSLLHSNGYNYLDWYLQKPGQSPQLLIYLSSNRASGVPDRFSGSGSGTDFTLKISRVEAEDVGIYYCMQPLQTPYTFGQGTKLEIK

SEQ ID NO: 675 - protein, 112 aa, synthetic construct; identical to SEQ ID NO: 604
  REGION 1..112: note = Synthetic construct

SEQ ID NO: 676 - protein, 112 aa, synthetic construct; identical to SEQ ID NO: 613
  REGION 1..112: note = Synthetic construct

SEQ ID NO: 677 - protein, 58 aa, synthetic construct; identical to SEQ ID NO: 650
  REGION 1..58: note = Synthetic construct

SEQ ID NO: 678 - protein, 20 aa, synthetic construct
  REGION 1..20: note = Synthetic construct
CMQPLQTPYTFGQGTKLEIK

SEQ ID NO: 679 - protein, 112 aa, synthetic construct
  REGION 1..112: note = Synthetic construct
DIVMTQSPLSLPVTPGEPASISCRSSQSLLHSNGYNYLDWYLQKPGQSPQLLIYLGSNRASGVPDRFSGSGSATDFTLKISRVEAEDVGVYYCMQPLQTPYTFGQGTKLEIK

SEQ ID NO: 680 - protein, 112 aa, synthetic construct
  REGION 1..112: note = Synthetic construct
DIVMTRSPLSLPVTPGEPASISCRSSQSLLHNNGYNYLAWYLQKPGQSPQLLIYLGSNRASGVPDRFSGSGSGTDFTLKISRVKAEDVGVYYCMQPLQTPYTFGQGTKLEIK

SEQ ID NO: 681 - protein, 112 aa, synthetic construct; identical to SEQ ID NO: 604
  REGION 1..112: note = Synthetic construct

SEQ ID NO: 682 - protein, 20 aa, synthetic construct
  REGION 1..20: note = Synthetic construct
CMQPLQTPYTFGQGTKLEIK

SEQ ID NO: 683 - protein, 112 aa, synthetic construct; identical to SEQ ID NO: 609
  REGION 1..112: note = Synthetic construct

SEQ ID NO: 684 - protein, 20 aa, synthetic construct
  REGION 1..20: note = Synthetic construct
CMQPLQTPYTFGQGTKLEIK

SEQ ID NO: 685 - protein, 112 aa, synthetic construct; identical to SEQ ID NO: 609
  REGION 1..112: note = Synthetic construct

SEQ ID NO: 686 - protein, 112 aa, synthetic construct; identical to SEQ ID NO: 609
  REGION 1..112: note = Synthetic construct

SEQ ID NO: 687 - protein, 112 aa, synthetic construct; identical to SEQ ID NO: 609
  REGION 1..112: note = Synthetic construct

SEQ ID NO: 688 - protein, 112 aa, synthetic construct; identical to SEQ ID NO: 609
  REGION 1..112: note = Synthetic construct

SEQ ID NO: 689 - protein, 112 aa, synthetic construct; identical to SEQ ID NO: 604
  REGION 1..112: note = Synthetic construct

SEQ ID NO: 690 - protein, 112 aa, synthetic construct; identical to SEQ ID NO: 604
  REGION 1..112: note = Synthetic construct

SEQ ID NO: 691 - protein, 112 aa, synthetic construct; identical to SEQ ID NO: 604
  REGION 1..112: note = Synthetic construct

SEQ ID NO: 692 - protein, 112 aa, synthetic construct; identical to SEQ ID NO: 604
  REGION 1..112: note = Synthetic construct

SEQ ID NO: 693 - protein, 112 aa, synthetic construct
  REGION 1..112: note = Synthetic construct
DIVMTQTPLSLSVTPGQPASISCKSSQSLLHSDGKTYLYWYLQKPGQSPQLLIYEVSNRFSGVPDGFSGSGSGTDFTLKISRVEAEDVGVYYCMQPLQTPYTFGQGTKLEIK

SEQ ID NO: 694 - protein, 112 aa, synthetic construct; identical to SEQ ID NO: 604
  REGION 1..112: note = Synthetic construct

SEQ ID NO: 695 - protein, 112 aa, synthetic construct; identical to SEQ ID NO: 644
  REGION 1..112: note = Synthetic construct

SEQ ID NO: 696 - protein, 112 aa, synthetic construct
  REGION 1..112: note = Synthetic construct
DIVMTQTPLSLSVTPGQPASISCKSSQSLLHVDGKTYLYWYLQKPGQPPQLLIYEVSNRFSGVPDRFSGSGSGTDFTLKISRVEAEDVGVYYCMQPLQTPYTFGQGTKLEIK

SEQ ID NO: 697 - protein, 112 aa, synthetic construct
  REGION 1..112: note = Synthetic construct
DIVMTQSPLSLPVTPGEPASISCRSSQSLLHNNGYNYLAWYPQKPGQSPQLLIYLGSNRASGVPDRFSGSGSGTDFTLKISRVKAEDVGVYYCMQPLQTPYTFGQGTKLEIK

SEQ ID NO: 698 - protein, 112 aa, synthetic construct; identical to SEQ ID NO: 609
  REGION 1..112: note = Synthetic construct

SEQ ID NO: 699 - protein, 112 aa, synthetic construct; identical to SEQ ID NO: 610
  REGION 1..112: note = Synthetic construct

SEQ ID NO: 700 - protein, 20 aa, synthetic construct
  REGION 1..20: note = Synthetic construct
CMQPLQTPYTFGQGTKLEIK

SEQ ID NO: 701 - protein, 105 aa, synthetic construct; identical to SEQ ID NO: 227
  REGION 1..105: note = Synthetic construct

SEQ ID NO: 702 - protein, 106 aa, synthetic construct
  REGION 1..106: note = Synthetic construct
DIQMTQSPSSLSASVGDRVTITCRASRSISSYLNWYQQKPGKAPNLLIYAASSLQSGVPSRFSGSGSGTDFTLTISSLQPEDFATYYCQQSYSTLTFGQGTKLEIK

SEQ ID NO: 703 - protein, 106 aa, synthetic construct
  REGION 1..106: note = Synthetic construct
DIQMTQSPSSLSASVGDRVTITCRASQSISSYLNWYQQKPGKAPKLLIYAASSLQSGVPSRFSGSGSGTDFTLTISSLQPEDFATYYCQQSYSTLTFGGGTKVEVK

SEQ ID NO: 704 - protein, 106 aa, synthetic construct
  REGION 1..106: note = Synthetic construct
DIQMTQSPSSLSASVGDRVTITCRASQSISSYLNWYQQKPGKAPKLLIYAASSLQSGVPSRFSGSGSGTDFTLTISSLQPEDFATYYCQQSYSTLTFGGGTKVEIK

SEQ ID NO: 705 - protein, 105 aa, synthetic construct
  REGION 1..105: note = Synthetic construct
DIQMTQSPSSLSASVGDRVTITCRASQSISSYLNWYQQKPGKAPKLLIYAASSLQSGVPSRFSGSGSGTDFTLTISSLQPEDFATYYCQQSYSTLTFGGGTKVEI

SEQ ID NO: 706 - protein, 106 aa, synthetic construct; identical to SEQ ID NO: 704
  REGION 1..106: note = Synthetic construct

SEQ ID NO: 707 - protein, 106 aa, synthetic construct
  REGION 1..106: note = Synthetic construct
DIQMTQSPSSLSASVGDRVTITCRASQSISSYLNWYQQKPGKAPKLLIYAASSLQSGVPSRYSGSGSGADFTLTISSLQPEDFATYYCQQSYSTLTFGGGTKVEIK

SEQ ID NO: 708 - protein, 106 aa, synthetic construct
  REGION 1..106: note = Synthetic construct
DIQMTQSPSSLSASVGDRVTITCRASQSISSYLNWYQQKPGKAPKLLIYAASSLQSGVPSRFSGSGSGTDFTLTISSLRPEDFATYYCQQSYSTLTFGQGTRLEIK

SEQ ID NO: 709 - protein, 106 aa, synthetic construct
  REGION 1..106: note = Synthetic construct
DIQMTQSPSSLSASVGDRVTITCRASQSISSYLNWYQQKPGKAPKLLIYAASSLQSGVPSRFSGSGSGTDFTLTISSLQPEDFATYYCQQSYSTLTFGPGTKVDIK

SEQ ID NO: 710 - protein, 106 aa, synthetic construct
  REGION 1..106: note = Synthetic construct
DIQMTQSPSSLSASVGDRVTITCRASQSISSYLNWYQQKPGKAPKLLIYAASSLQSGVPSRFSGSGSGKDFTLTISSLQPEDFATYYCQQSYSTLTFGGGTKVEIK

SEQ ID NO: 711 - protein, 105 aa, synthetic construct
  REGION 1..105: note = Synthetic construct
DIQMTQSPSTLSASVGDRVTITCRASQSISSYLNWYQQKPGKAPKLLIYAASSLQSGVPSRFSGSGSGTDFTLTISSLQPEDFATYYCQQSYSTLTFGGGTKEIK

SEQ ID NO: 712 - protein, 106 aa, synthetic construct; identical to SEQ ID NO: 704
  REGION 1..106: note = Synthetic construct

SEQ ID NO: 713 - protein, 106 aa, synthetic construct; identical to SEQ ID NO: 709
  REGION 1..106: note = Synthetic construct

SEQ ID NO: 714 - protein, 80 aa, synthetic construct
  REGION 1..80: note = Synthetic construct
QSISSYLNWYQQKPGKAPKLLIYAASSLQSGVPSRFSGSGSGTDFTLTISSLQPEDFATYYCQQSYSTLTFGGGTKVEIK

SEQ ID NO: 715 - protein, 106 aa, synthetic construct
  REGION 1..106: note = Synthetic construct
DIQMTQSPSSLSASVGDRVTITCRASQSISSYLNWYQQKPGKAPKLLIYAASSLQSGVPSRFGGSGSGTDFTLTISSLQPEDFATYYCQQSYSTLTFGGGTKVEIK

SEQ ID NO: 716 - protein, 106 aa, synthetic construct; identical to SEQ ID NO: 704
  REGION 1..106: note = Synthetic construct

SEQ ID NO: 717 - protein, 106 aa, synthetic construct
  REGION 1..106: note = Synthetic construct
DIQMTQSPSSLSASVGDRVTITCRASQSISNYLNWYQQKPGEAPKLLIYAASSLESGVPSRFSGSGSGADFTLTISSLQPEDFATYYCQQSYSTLTFGGGTKVEIK

SEQ ID NO: 718 - protein, 106 aa, synthetic construct
  REGION 1..106: note = Synthetic construct
DIQMTQSPSSLSASVGDRVTITCRASQSISNYLNWYQQKPGEAPKLLIYAASSLESGVPSRFSGSGSGTDFTLTISSLQPEDFATYYCQQSYSTLTFGGGTKVEIK

SEQ ID NO: 719 - protein, 106 aa, synthetic construct
  REGION 1..106: note = Synthetic construct
DIQMTQSPSSLSASVGDRVTITCRASQSISSYLNWYQQKPGKAPKLLIYAASSLQSGVPSRFSGSGSGTDFTLTISSLQPEDFATYYCQQSYSTLTFGQGTKVEIK

SEQ ID NO: 720 - protein, 74 aa, synthetic construct
  REGION 1..74: note = Synthetic construct
LNWYQQKPGKAPKLLIYAASSLQSGVPSRFSGSGSGTDFTLTISSLQPEDFATYYCQQSYSTLTFGQGTRLEIK

SEQ ID NO: 721 - protein, 106 aa, synthetic construct
  REGION 1..106: note = Synthetic construct
DILLTQSPSSLSAFVGDTVTITCRASQSSSTYVNWYQQKPGKAPKLLIYAASSLQSGVPSRFSGSGSGTDFTLTISSLQPEDFATYYCQQSYSTLTFGPGTKVDIK

SEQ ID NO: 722 - protein, 106 aa, synthetic construct
  REGION 1..106: note = Synthetic construct
DIQMTQSPSSLSASVGDRVTITCRASQSISSYLNWYQQKPGKAPKLLIYAASSLQSGVPSRFSGSGSGTDFTLTISSLQPEEFATYYCQQSYSTLTFGGGTKVEIK

SEQ ID NO: 723 - protein, 106 aa, synthetic construct
  REGION 1..106: note = Synthetic construct
DIQMTQSPSSLSASVGDRVTITCRASQNISSYLNWYQQKPGKAPKLLIYAASSLQSGVPSRFSGSGSGTDFTLTIISLQPEDFATYYCQQSYSTLTFGGGTKGEIK

SEQ ID NO: 724 - protein, 106 aa, synthetic construct
  REGION 1..106: note = Synthetic construct
DIQMTQSPSSLSASVGDRVTITCRASRSISSYLNWYQQKPGKAPKLLIYAASSLQSGVPSRFSGSGSGTDFTLTISSLQPEDFATYYCQQSYSTLTFGGGTKVEIK

SEQ ID NO: 725 - protein, 106 aa, synthetic construct
  REGION 1..106: note = Synthetic construct
DIQMTQSPSSVSASVGDRVTITCRASQGISSWLAWYQQKPGKAPKLLIYAASSLQSGVPSRFSGSGSGTDFTLTISSLQPEDFATYYCQQSYSTLTFGQGTRLEIK

SEQ ID NO: 726 - protein, 106 aa, synthetic construct
  REGION 1..106: note = Synthetic construct
AIRITQSPSSLSASTGDRVTITCRASQGISNYLAWFQQKPGKAPKLLIYAASSLQSGAPSRFSGSGSGTDFTLTISSLQPEDFATYYCQQSYSTLTFGGGTKVEIK

SEQ ID NO: 727 - protein, 106 aa, synthetic construct
  REGION 1..106: note = Synthetic construct
DIQMTQSPSSLSATVGDRVTITCRASQSISNYLNWYQQKPGEAPKPLIYAASSLESGVPSRFSGSGSGTDFTLTISSLQPEDFATYYCQQSYSTLTFGGGTKVEIK

SEQ ID NO: 728 - protein, 106 aa, synthetic construct
  REGION 1..106: note = Synthetic construct
DIQMTQSPSSMSASVGDRVTITCRASQGISSWLAWYQQRPGKAPKLLIYDASRLQSGVPSRFSGSRSGTDFTLTISSLQPEDFATYYCQQSYSTLTFGGGTKVEIK

SEQ ID NO: 729 - protein, 106 aa, synthetic construct; identical to SEQ ID NO: 719
  REGION 1..106: note = Synthetic construct

SEQ ID NO: 730 - protein, 106 aa, synthetic construct; identical to SEQ ID NO: 704
  REGION 1..106: note = Synthetic construct

SEQ ID NO: 731 - protein, 104 aa, synthetic construct
  REGION 1..104: note = Synthetic construct
QMPQSPSSLSASVGDRVTITCRASQSISSYLNWYQQKPGKAPKLLIYAASSLQSGVPSRFSGSGSGTDFTLTISSLQPEDFGTYYCQQSYSTLTFGGGTKVEIK

SEQ ID NO: 732 - protein, 106 aa, synthetic construct; identical to SEQ ID NO: 704
  REGION 1..106: note = Synthetic construct

SEQ ID NO: 733 - protein, 106 aa, synthetic construct; identical to SEQ ID NO: 704
  REGION 1..106: note = Synthetic construct

SEQ ID NO: 734 - protein, 106 aa, synthetic construct
  REGION 1..106: note = Synthetic construct
DIQMTQSPSSLSASVGDRVTITCRASQSISNYLNWYQQKPGVAPKLLIYAASSLESGVPSRFSGSGSGTDFTLTISSLQPEDFATYYCQQSYSTLTFGGGTKVEIK

SEQ ID NO: 735 - protein, 106 aa, synthetic construct
  REGION 1..106: note = Synthetic construct
DIQMTQSPSSLSASVGDRVTITCRASQSISSYLNWYQQKPGKAPKLLIYAASSLQSGVPSRFSGSGSGTDFTLTISSLQPEDFATYYCQQSYSTLTFGQGTRLEIK

SEQ ID NO: 736 - protein, 106 aa, synthetic construct
  REGION 1..106: note = Synthetic construct
DIQLTQSPSSLAASVGDRVTITCRASQPIVNYLHWYQQKSGKAPQLLIYSASTLHSGVPSRFIGSGSGADFTLTINNLQPDDFATYYCQQSYSTLTFGQGTKVEIK

SEQ ID NO: 737 - protein, 106 aa, synthetic construct
  REGION 1..106: note = Synthetic construct
DIQMTQSPSSLSASVGDKVTITCRASQSISTYLNWYQQKPGKAPKLLIYAASSLQTGVPSRFSGSGSGTDFTLTISSLQPEDFATFYCQQSYSTLTFGGGTKVEIK

SEQ ID NO: 738 - protein, 105 aa, synthetic construct
  REGION 1..105: note = Synthetic construct
DIQMTQSPSSLSASVGDRVTITCRASQSISSYLNWYQQKPGKAPKLLIYAASSLQSGVPSRFSGSGSGTDFTLTISSLQPEDSATYYCQQSYSTLTFGGGTKVEI

SEQ ID NO: 739 - protein, 106 aa, synthetic construct; identical to SEQ ID NO: 704
  REGION 1..106: note = Synthetic construct

SEQ ID NO: 740 - protein, 106 aa, synthetic construct; identical to SEQ ID NO: 704
  REGION 1..106: note = Synthetic construct

SEQ ID NO: 741 - protein, 106 aa, synthetic construct; identical to SEQ ID NO: 709
  REGION 1..106: note = Synthetic construct

SEQ ID NO: 742 - protein, 106 aa, synthetic construct; identical to SEQ ID NO: 709
  REGION 1..106: note = Synthetic construct

SEQ ID NO: 743 - protein, 106 aa, synthetic construct
  REGION 1..106: note = Synthetic construct
DIQMTQSPSSLSASVGDRVTITCRASQSIRSYLNWYQQKPGKAPKLLIYAASSLQSGVPSRFSGSGSGTDFTPTISSLHPEDFATYYCQQSYSTLTFGGGTKVEIK

SEQ ID NO: 744 - protein, 106 aa, synthetic construct; identical to SEQ ID NO: 704
  REGION 1..106: note = Synthetic construct

SEQ ID NO: 745 - protein, 19 aa, synthetic construct
  REGION 1..19: note = Synthetic construct
CQQSYSTLTFGGGTKVEIK

SEQ ID NO: 746 - protein, 80 aa, synthetic construct
  REGION 1..80: note = Synthetic construct
QGISSYLAWYQQKPGKAPKLLIYAASTLQSGVPSSFSGSGSGTDFTLTISSLQPEDFATYYCQQSYSTLTFGGGTKVEIK

SEQ ID NO: 747 - protein, 106 aa, synthetic construct; identical to SEQ ID NO: 735
  REGION 1..106: note = Synthetic construct

SEQ ID NO: 748 - protein, 106 aa, synthetic construct; identical to SEQ ID NO: 704
  REGION 1..106: note = Synthetic construct

SEQ ID NO: 749 - protein, 106 aa, synthetic construct
  REGION 1..106: note = Synthetic construct
DIQMTQSPSSLSASVGDRVTITCRASQSISSYLNWYQQKPGKAPKLLIYAASSLQSGVPSRFSGSGSGTDFTLTIRSLQPEDFATYYCQQSYSTLTFGGGTKVEIK

SEQ ID NO: 750 - protein, 106 aa, synthetic construct; identical to SEQ ID NO: 719
  REGION 1..106: note = Synthetic construct

SEQ ID NO: 751 - protein, 106 aa, synthetic construct
  REGION 1..106: note = Synthetic construct
DIQMTQSPSSLSASVGDRVTITCRASQSISSYLKWYQQKPGKAPKLLIYAASSLQSGVPTRFSGSGSGTDFTLTISSLQPEDFATYYCQQSYSTLTFGGGTKVEIK

SEQ ID NO: 752 - protein, 106 aa, synthetic construct
  REGION 1..106: note = Synthetic construct
DIQMTQSPSSVSASVGDRVTITCRASQGISSWLAWYQQKPGKAPKLLIYAASSLQSGVPSRFSGSGSGTDFTLTISSLQPEDFATYYCQQSYSTLTFGPGTKVEIK

SEQ ID NO: 753 - protein, 106 aa, synthetic construct; identical to SEQ ID NO: 704
  REGION 1..106: note = Synthetic construct

SEQ ID NO: 754 - protein, 106 aa, synthetic construct
  REGION 1..106: note = Synthetic construct
DIQMTQSPSSLSASVGDRVTFTCRASQSISSYLNWYQQKPGKAPKLLIYAASSLQSGVPSRFSGSGSGTDFTLTISSLQPEDFATYYCQQSYSTLTFGPGTKVDIK

SEQ ID NO: 755 - protein, 106 aa, synthetic construct
  REGION 1..106: note = Synthetic construct
DIQMTQSPSSLSASVGDRVTITCRASQTINNYLNWYQQKPGKAPKLLIYAASSLQSGVPSRFSGSGSGTDFTLTISTLQPDDFATYYCQQSYSTLTFGGGTKVEIK

SEQ ID NO: 756 - protein, 106 aa, synthetic construct
  REGION 1..106: note = Synthetic construct
DIQMTQSPSSLSASVGDRVTITCRASQSISNYLNWYQQKPGKAPKLLIYAASSLQSGVPSRFSGSGSGTDFTLTISSLQPEDFATYYCQQSYSTLTFGPGTKVDIK

SEQ ID NO: 757 - protein, 106 aa, synthetic construct
  REGION 1..106: note = Synthetic construct
DIQMTQSPSTLSASVGDRVTITCRASQSISSYLNWYQQKPGKAPKLLIYAASSLQSGVPSRFSGSGSGTDFTLTISSLQPEDFATYYCQQSYSTLTFGQGTKVEIK

SEQ ID NO: 758 - protein, 106 aa, synthetic construct; identical to SEQ ID NO: 735
  REGION 1..106: note = Synthetic construct

SEQ ID NO: 759 - protein, 106 aa, synthetic construct; identical to SEQ ID NO: 709
  REGION 1..106: note = Synthetic construct

SEQ ID NO: 760 - protein, 106 aa, synthetic construct; identical to SEQ ID NO: 718
  REGION 1..106: note = Synthetic construct

SEQ ID NO: 761 - protein, 106 aa, synthetic construct; identical to SEQ ID NO: 735
  REGION 1..106: note = Synthetic construct

SEQ ID NO: 762 - protein, 106 aa, synthetic construct; identical to SEQ ID NO: 704
  REGION 1..106: note = Synthetic construct

SEQ ID NO: 763 - protein, 106 aa, synthetic construct; identical to SEQ ID NO: 704
  REGION 1..106: note = Synthetic construct

SEQ ID NO: 764 - protein, 106 aa, synthetic construct; identical to SEQ ID NO: 704
  REGION 1..106: note = Synthetic construct

SEQ ID NO: 765 - protein, 106 aa, synthetic construct; identical to SEQ ID NO: 735
  REGION 1..106: note = Synthetic construct

SEQ ID NO: 766 - protein, 106 aa, synthetic construct
  REGION 1..106: note = Synthetic construct
DIQMTQSPSSMSASVGDRVSITCRASQGISSWLAWYQQRPGKAPKLLIYDASRLQSGVPSRFSGSGSGTAFTLTISSLQPEDFATYYCQQSYSTLTFGPGTKVDIK

SEQ ID NO: 767 - protein, 106 aa, synthetic construct
  REGION 1..106: note = Synthetic construct
DIQMTQSPSSLSASVGDRVTITCRASQSISNYLSWYQQKPGEAPKLLIYAASSLESGVPSRFSGSGSGTDFTLTISSLQPEDFATYYCQQSYSTLTFGGGTKVEIK

SEQ ID NO: 768 - protein, 106 aa, synthetic construct; identical to SEQ ID NO: 704
  REGION 1..106: note = Synthetic construct

SEQ ID NO: 769 - protein, 106 aa, synthetic construct; identical to SEQ ID NO: 704
  REGION 1..106: note = Synthetic construct

SEQ ID NO: 770 - protein, 106 aa, synthetic construct
  REGION 1..106: note = Synthetic construct
DIQMTQSPSSLSASVGDRVTITCRASQSISSYLNWYQQKPGKAPKLLIYAASSLQSGVPSKFSGSGSGTDFTLTISSLQPEDFATYYCQQSYSTLTFGGGTKVEIK

SEQ ID NO: 771 - protein, 106 aa, synthetic construct
  REGION 1..106: note = Synthetic construct
DIQMTQSPSSLSVSVGDRVTITCRASQSISSYLNWYQQKPGKAPKLLIYAASSLQSGVPSRFSGSGSGTDFTLTISSLQPEDFATYYCQQSYSTLTFGQGTRLEIK

SEQ ID NO: 772 - protein, 106 aa, synthetic construct; identical to SEQ ID NO: 704
  REGION 1..106: note = Synthetic construct

SEQ ID NO: 773 - protein, 106 aa, synthetic construct; identical to SEQ ID NO: 704
  REGION 1..106: note = Synthetic construct

SEQ ID NO: 774 - protein, 106 aa, synthetic construct
  REGION 1..106: note = Synthetic construct
DIQMTQSPSSLSASVGDRVTITCRASQSISSYLNWYQQKPGKAPKLLIYAASSLQSGVPSRFSGSGSGTDFTLTISSLQPEDFATYYCQQSYSTLTFGGGTKVVIK

SEQ ID NO: 775 - protein, 106 aa, synthetic construct; identical to SEQ ID NO: 709
  REGION 1..106: note = Synthetic construct

SEQ ID NO: 776 - protein, 106 aa, synthetic construct; identical to SEQ ID NO: 704
  REGION 1..106: note = Synthetic construct

SEQ ID NO: 777 - protein, 106 aa, synthetic construct
  REGION 1..106: note = Synthetic construct
DIQMTQSPSSLSASVGDRVTITRRASQSISSYLNWYQQKPGKAPKLLIYAASSLQSGVPSRFSGSGSGTDFTLTISSLQPEDFATYYCQQSYSTLTFGGGTKVEIK

SEQ ID NO: 778 - protein, 106 aa, synthetic construct
  REGION 1..106: note = Synthetic construct
DIQMTQSPSSLSASVGDRVTITCQASQDISNYLNWYQQKPGEAPKLLIYAASSLESGVPSRFSGSGSGTDFTRTISSLQPEDFATYYCQQSYSTLTFGGGTKVEIK

SEQ ID NO: 779 - protein, 106 aa, synthetic construct; identical to SEQ ID NO: 709
  REGION 1..106: note = Synthetic construct

SEQ ID NO: 780 - protein, 80 aa, synthetic construct; identical to SEQ ID NO: 714
  REGION 1..80: note = Synthetic construct

SEQ ID NO: 781 - protein, 106 aa, synthetic construct
  REGION 1..106: note = Synthetic construct
DIQMTQSPSSLSASVGDRVTITCRACQSISTYLNWYQQKPGKAPKLLIYAASSLQTGVPSRFSGSGSGTDFTLTISSLQPEDFATFYCQQSYSTLTFGGGTKVETK

SEQ ID NO: 782 - protein, 106 aa, synthetic construct; identical to SEQ ID NO: 709
  REGION 1..106: note = Synthetic construct

SEQ ID NO: 783 - protein, 106 aa, synthetic construct
  REGION 1..106: note = Synthetic construct
DIQMTQSPSSLSASAGDRVTITCRASQSISSYLNWYQQKPGKAPKLLIYAASSLQSGVPSRFSGSGSGTDFTLTISSLQPEDFATYYCQQSYSTLTFGGGTKVEIK

SEQ ID NO: 784 - protein, 106 aa, synthetic construct
  REGION 1..106: note = Synthetic construct
DIQMTQSPSSLSASVGDRVTITCRASQSISSYLNWYQQKPGKAPKLLIYAASSLQRGVPSRFSGSGSGTDFTLTNSSLQPEDFATYYCQQSYSTLTFGGGTKVEIK

SEQ ID NO: 785 - protein, 106 aa, synthetic construct; identical to SEQ ID NO: 704
  REGION 1..106: note = Synthetic construct

SEQ ID NO: 786 - protein, 106 aa, synthetic construct
  REGION 1..106: note = Synthetic construct
DIQMTQSPSSLSASVGDRVTITCRASQSISSYLNWYQQKPGKAPKLLIYAASSLQSGVPSGFSGSGSGTDFTLTISSLQPEDFATYYCQQSYSTLTFGGGTKVEIK

SEQ ID NO: 787 - protein, 106 aa, synthetic construct
  REGION 1..106: note = Synthetic construct
DIQMAQSPSSLSASVGDRVTITCRASQSISNYLNWYQQKPGEAPKLLIYAASSLESGVPSRFSGSGSGTDFTLTISSLQPEDFATYYCQQSYSTLTFGGGTKVEIK

SEQ ID NO: 788 - protein, 106 aa, synthetic construct; identical to SEQ ID NO: 704
  REGION 1..106: note = Synthetic construct

SEQ ID NO: 789 - protein, 106 aa, synthetic construct
  REGION 1..106: note = Synthetic construct
DIQMTQSPSSLSASVGDRVTITCRASQSISSYLNWYQQKPGKAPKLLIYAASSLQSGVPSRFSGSGSGTDFTLTISSLQPEGFATYYCQQSYSTLTFGPGTKVDIK

SEQ ID NO: 790 - protein, 106 aa, synthetic construct
  REGION 1..106: note = Synthetic construct
DIQMTQSPSSLSASVGDRVTITCRASQSISSYLNWYQQKPGKAPKLLVYAASSLQSGVPSRFSGSGSGTDFTLTISSLQPEDFATYYCQQSYSTLTFGGGTKVEIK

SEQ ID NO: 791 - protein, 105 aa, synthetic construct
  REGION 1..105: note = Synthetic construct
DIQMTQSPSSLSASVGDRVTITCRASQSISSYLNWYQQKPGKAPKLLIYAASSLQSGVPSRFSGSGSGTDFTLTISSLQPEDFATYYCQQSYSTLTFGPGTKVDI

SEQ ID NO: 792 - protein, 106 aa, synthetic construct; identical to SEQ ID NO: 718
  REGION 1..106: note = Synthetic construct

SEQ ID NO: 793 - protein, 57 aa, synthetic construct
  REGION 1..57: note = Synthetic construct
AASSLQSGVPSRFSGSGSGTDFTLTISSLQPEDFATYYCQQSYSTLTFGQGTRLEFK

SEQ ID NO: 794 - protein, 106 aa, synthetic construct
  REGION 1..106: note = Synthetic construct
DIQMTQSPSSLSASVGDRVTITCRASQSISSYLNWYQQKPGKTPKLLIYAASSLQSGVPSRFSGSGSGTDFTLTISSLQPEDFATYYCQQSYSTLTFGGGTKVEIK

SEQ ID NO: 795 - protein, 106 aa, synthetic construct; identical to SEQ ID NO: 704
  REGION 1..106: note = Synthetic construct

SEQ ID NO: 796 - protein, 106 aa, synthetic construct; identical to SEQ ID NO: 704
  REGION 1..106: note = Synthetic construct

SEQ ID NO: 797 - protein, 106 aa, synthetic construct; identical to SEQ ID NO: 735
  REGION 1..106: note = Synthetic construct

SEQ ID NO: 798 - protein, 106 aa, synthetic construct; identical to SEQ ID NO: 704
  REGION 1..106: note = Synthetic construct

SEQ ID NO: 799 - protein, 106 aa, synthetic construct
  REGION 1..106: note = Synthetic construct
DIQMTQFPSSLSASVGDRVTITCRASQSISSYLNWYQQKPGKAPKLLIYAASSLQSGVPSRFSGSGSGTDFTLTISSLQPEDFATYYCQQSYSTLTFGGGTKVEIK

SEQ ID NO: 800 - protein, 106 aa, synthetic construct; identical to SEQ ID NO: 709
  REGION 1..106: note = Synthetic construct

SEQ ID NO: 801 - protein, 106 aa, synthetic construct; identical to SEQ ID NO: 704
  REGION 1..106: note = Synthetic construct

SEQ ID NO: 802 - protein, 106 aa, synthetic construct
  REGION 1..106: note = Synthetic construct
DIQMTQSPSSLSASVGDRVTITCRASQNINTWLAWYQQKAGKAPKLLIYDVSSLESGVPSRFSGSGSGTDFTLTISSLQPEDFATYYCQQSYSTLTFGGGTKVEIK

SEQ ID NO: 803 - protein, 106 aa, synthetic construct; identical to SEQ ID NO: 704
  REGION 1..106: note = Synthetic construct

SEQ ID NO: 804 - protein, 106 aa, synthetic construct
  REGION 1..106: note = Synthetic construct
DIQMTQSPSSLSASVGDRVTITCRASQSISRYLNWYQQKPGKAPKLLIYAASSLQSGVPSRFSGSGSGTDFTLTISSLQPEDFATYYCQQSYSTLTFGQGTKLEIK

SEQ ID NO: 805 - protein, 106 aa, synthetic construct; identical to SEQ ID NO: 704
  REGION 1..106: note = Synthetic construct

SEQ ID NO: 806 - protein, 106 aa, synthetic construct
  REGION 1..106: note = Synthetic construct
DIQMTQSPSSLSASVGDRVTITCRASQSISSYLNWYQQKPGKAPKLLIYAASSLQSGVPSRFSGSGSGTDFTLTISSLQPEDFATYYCQQSYSTLTFGQGTKLEIK

SEQ ID NO: 807 - protein, 106 aa, synthetic construct
  REGION 1..106: note = Synthetic construct
DIQITQSPSSLSASVGDRVTITCRASQSISSYLNWYQQKPGKAPKLLIYAASSLQSGVPSRFSGSGSGTDFTLTISSLQPEDFATYYCQQSYSTLTFGGGTKVEIK

SEQ ID NO: 808 - protein, 106 aa, synthetic construct
  REGION 1..106: note = Synthetic construct
DIQMTQSPSSLSASVGVRVTITCRASQSISSYLNWYQQKPGKAPKLLIYAASSLQSGVPSRFSGSGSGTDFTLTISSLQPEDFATYYCQQSYSTLTFGGGTKVEIK

SEQ ID NO: 809 - protein, 106 aa, synthetic construct
  REGION 1..106: note = Synthetic construct
DIQMTQSPSSLSASVGDGVTITCRASQSISSYLNWYQQKPGKAPKLLIYAASSLQSGVPSRFSGSGSGTDFTLTISSLQPEDFATYYCQQSYSTLTFGGGTKVEIK

SEQ ID NO: 810 - protein, 112 aa, synthetic construct
  REGION 1..112: note = Synthetic construct
DIVMTQSPDSLAVFLGERATINCKSSQSVLYSSNNKNYLAWYQQKPGQPPKLLIYWASTRESGVPDRFSGSGSGTDFTLTISSLQAEDFATYYCQQSYSTLTFGQGTRLEIK

SEQ ID NO: 811 - protein, 106 aa, synthetic construct
  REGION 1..106: note = Synthetic construct
DIQMTQSPSSLSASVGDRVTITCRASQSISSYLNWYQQKLGKAPKLLIYAASSLQSGVPSRFSGSGSGTDFTLTISSLQPEDFATYYCQQSYSTLTFGQGTKVEIK

SEQ ID NO: 812 - protein, 106 aa, synthetic construct
  REGION 1..106: note = Synthetic construct
DIQMTQSPSSLSASVGDRVTITCRASQGTSNYLACYQQKPGKVPKFLIYAASTLQSGVPSRLSGSGSGTDFTLTISSLQPEDFATYYCQQSYSTLTFGQGTRLEMK

SEQ ID NO: 813 - protein, 57 aa, synthetic construct
  REGION 1..57: note = Synthetic construct
AASSLQSGVPSRFSGSGSGTDFTLTISSLQPEDFATYYCQQSYSTLTFGQGTKVEIK

SEQ ID NO: 814 - protein, 106 aa, synthetic construct
  REGION 1..106: note = Synthetic construct
DIQMTQSPSYLSASVGDRVTITCRASQSISSYLNWYQQKPGKAPKLLIYVASSLLSGVPSRFSGSGSGTDFTLTISSLQPEDFATYYCQQSYSTLTFGGGTKVEIK

SEQ ID NO: 815 - protein, 106 aa, synthetic construct; identical to SEQ ID NO: 709
  REGION 1..106: note = Synthetic construct

SEQ ID NO: 816 - protein, 106 aa, synthetic construct; identical to SEQ ID NO: 709
  REGION 1..106: note = Synthetic construct

SEQ ID NO: 817 - protein, 106 aa, synthetic construct; identical to SEQ ID NO: 709
  REGION 1..106: note = Synthetic construct

SEQ ID NO: 818 - protein, 106 aa, synthetic construct; identical to SEQ ID NO: 709
  REGION 1..106: note = Synthetic construct

SEQ ID NO: 819 - protein, 106 aa, synthetic construct; identical to SEQ ID NO: 718
  REGION 1..106: note = Synthetic construct

SEQ ID NO: 820 - protein, 57 aa, synthetic construct
  REGION 1..57: note = Synthetic construct
AASSLQSGVPSRFSGSGSGTDFTLTISSLQPEDFATYYCQQSYSTLTFGQGTRLEIK

SEQ ID NO: 821 - protein, 80 aa, synthetic construct
  REGION 1..80: note = Synthetic construct
QSINTLLAWFQQKPGKAPKSLIYGASSLQSGVPSRFSGSGSGTDFTLTISSLQPEDFATYYCQQSYSTLTFGPGTKVDIK

SEQ ID NO: 822 - protein, 80 aa, synthetic construct; identical to SEQ ID NO: 714
  REGION 1..80: note = Synthetic construct

SEQ ID NO: 823 - protein, 105 aa, synthetic construct
  REGION 1..105: note = Synthetic construct
DIQMTQSPSSLSASLGDRVTITCRASQSISRYLNWYQQKPGKAPKLPIYAASSLQSGVPSRFSGSGSGTDFTLTISSLQPEDFATYYCQQSYSTLTFGGGTKVEI

SEQ ID NO: 824 - protein, 106 aa, synthetic construct; identical to SEQ ID NO: 704
  REGION 1..106: note = Synthetic construct

SEQ ID NO: 825 - protein, 106 aa, synthetic construct; identical to SEQ ID NO: 704
  REGION 1..106: note = Synthetic construct

SEQ ID NO: 826 - protein, 106 aa, synthetic construct; identical to SEQ ID NO: 709
  REGION 1..106: note = Synthetic construct

SEQ ID NO: 827 - protein, 106 aa, synthetic construct
  REGION 1..106: note = Synthetic construct
DIQMTQSPSSLSASVGDRVTITCRASQSISSYLNWYQQKPGKAPKLLIYAASSLQIGVPSRFSGSGSGTDFTLTISSLQPEDFSTYYCQQSYSTLTFGGGTKVEIK

SEQ ID NO: 828 - protein, 106 aa, synthetic construct
  REGION 1..106: note = Synthetic construct
DIQMTQSPSSLSASVGDRVTITCRASQSISSYLNWYQLKPGKAPKLLIYAASSLQSGVPSRFSGSGSGTDFTLTISSLQPEDFATYYCQQSYSTLTFGGGTKVEIK

SEQ ID NO: 829 - protein, 106 aa, synthetic construct; identical to SEQ ID NO: 704
  REGION 1..106: note = Synthetic construct

SEQ ID NO: 830 - protein, 106 aa, synthetic construct; identical to SEQ ID NO: 704
  REGION 1..106: note = Synthetic construct

SEQ ID NO: 831 - protein, 106 aa, synthetic construct
  REGION 1..106: note = Synthetic construct
DIQMTQSPSSLSASVGDRVTITCRASQSISSYLNWYQQEPGKAPKLLIYAASSLQSGVPSRFSGSGSGTDFTLTISSLQPEDFATYYCQQSYSTLTFGGGTKVEIK

SEQ ID NO: 832 - protein, 106 aa, synthetic construct
  REGION 1..106: note = Synthetic construct
DIQMTQSPSSLSASVGDRVTITCRASQNISSYLNWYQQKPGKAPNVLIYAASSLQSGVPSRFSGSGSGTDFTLTISSLQPEDFATYYCQQSYSTLTFGGGTKVEIK

SEQ ID NO: 833 - protein, 106 aa, synthetic construct; identical to SEQ ID NO: 704
  REGION 1..106: note = Synthetic construct

SEQ ID NO: 834 - protein, 106 aa, synthetic construct; identical to SEQ ID NO: 704
  REGION 1..106: note = Synthetic construct

SEQ ID NO: 835 - protein, 106 aa, synthetic construct; identical to SEQ ID NO: 735
  REGION 1..106: note = Synthetic construct

SEQ ID NO: 836 - protein, 74 aa, synthetic construct
  REGION 1..74: note = Synthetic construct
LNWYQQKPGEAPKLLIYAASSLESGVPSRFSGSGSGTDFTLTISSLQPEDFATYYCQQSYSTLTFGGGTKVEIK

SEQ ID NO: 837 - protein, 106 aa, synthetic construct; identical to SEQ ID NO: 709
  REGION 1..106: note = Synthetic construct

SEQ ID NO: 838 - protein, 53 aa, synthetic construct
  REGION 1..53: note = Synthetic construct
LQSGVPSRFGGSGSGTDFTLTISSLQPEDFATYYCQQSYSTLTFGGGTKVEIK

SEQ ID NO: 839 - protein, 106 aa, synthetic construct; identical to SEQ ID NO: 704
  REGION 1..106: note = Synthetic construct

SEQ ID NO: 840 - protein, 106 aa, synthetic construct; identical to SEQ ID NO: 719
  REGION 1..106: note = Synthetic construct

SEQ ID NO: 841 - protein, 80 aa, synthetic construct
  REGION 1..80: note = Synthetic construct
QSISSYLNWYQQKPGKAPKLLIYAASSLQSGVPSRFSGSGSGTDFTLTISSLQPEDFATYYCQQSYSTLTFGPGTKVDIK

SEQ ID NO: 842 - protein, 106 aa, synthetic construct; identical to SEQ ID NO: 704
  REGION 1..106: note = Synthetic construct

SEQ ID NO: 843 - protein, 106 aa, synthetic construct; identical to SEQ ID NO: 704
  REGION 1..106: note = Synthetic construct

SEQ ID NO: 844 - protein, 106 aa, synthetic construct
  REGION 1..106: note = Synthetic construct
DIQMTQSPSSLSASVGDRVTITCRASQSISSYLNWYQQKRGKAPKLLIYAASSLQSGVPSRFSGSGSGTDFTLTISSLQPEDFATYHCQQSYSTLTFGGGTKVEIK

SEQ ID NO: 845 - protein, 106 aa, synthetic construct; identical to SEQ ID NO: 704
  REGION 1..106: note = Synthetic construct

SEQ ID NO: 846 - protein, 106 aa, synthetic construct; identical to SEQ ID NO: 735
  REGION 1..106: note = Synthetic construct

SEQ ID NO: 847 - protein, 106 aa, synthetic construct; identical to SEQ ID NO: 704
  REGION 1..106: note = Synthetic construct

SEQ ID NO: 848 - protein, 106 aa, synthetic construct; identical to SEQ ID NO: 719
  REGION 1..106: note = Synthetic construct

SEQ ID NO: 849 - protein, 106 aa, synthetic construct
  REGION 1..106: note = Synthetic construct
DIQMTQSPSSLSASVGDRVTITCRASQSISSYLNWYQQKPGKAPKLVIYAASSLQSGVPSRFSGSGSGTDFTLTISSLQPEDFATYYCQQSYSTLTFGGGTKVEIK

SEQ ID NO: 850 - protein, 106 aa, synthetic construct; identical to SEQ ID NO: 704
  REGION 1..106: note = Synthetic construct

SEQ ID NO: 851 - protein, 106 aa, synthetic construct; identical to SEQ ID NO: 735
  REGION 1..106: note = Synthetic construct

SEQ ID NO: 852 - protein, 106 aa, synthetic construct
  REGION 1..106: note = Synthetic construct
DIQMTQSPSSLSASVGDRVTITCRASQSISSHLNWYQQKPGKAPKLLIYATSSLQSGVPSRFSGSGSGTDFTLTISSLQPEDFATYYCQQSYSTLTFGGGTKVEIK

SEQ ID NO: 853 - protein, 106 aa, synthetic construct; identical to SEQ ID NO: 718
  REGION 1..106: note = Synthetic construct

SEQ ID NO: 854 - protein, 106 aa, synthetic construct
  REGION 1..106: note = Synthetic construct
DIQMTQSPSSLSASVGDRVTITCRASQSISSYLNWYQQKPGKAPKLLIYAASSLQSGVPSRFSGSGSGTDFTLTISSLQPEDFATYYCQQSYSTLTFGPGTKEDIK

SEQ ID NO: 855 - protein, 80 aa, synthetic construct; identical to SEQ ID NO: 841
  REGION 1..80: note = Synthetic construct

SEQ ID NO: 856 - protein, 106 aa, synthetic construct
  REGION 1..106: note = Synthetic construct
DIQMTQSPSTLSASVGDRVTITCRASQGIVKWLAWYQQKPGRAPKLLIYKASSLESGVPSRFSGSGSGTEFTLTISSLQPEDFATYYCQQSYSTLTFGGGTKVEIK

SEQ ID NO: 857 - protein, 106 aa, synthetic construct; identical to SEQ ID NO: 709
  REGION 1..106: note = Synthetic construct

SEQ ID NO: 858 - protein, 106 aa, synthetic construct; identical to SEQ ID NO: 704
  REGION 1..106: note = Synthetic construct

SEQ ID NO: 859 - protein, 106 aa, synthetic construct; identical to SEQ ID NO: 704
  REGION 1..106: note = Synthetic construct

SEQ ID NO: 860 - protein, 106 aa, synthetic construct
  REGION 1..106: note = Synthetic construct
DIQMTQSPSSLSASVGDRVTITCRASQSISRYLNWYQQKPGKAPKLLIYAASSLQSGVPSRFSGSGSGTDFTLTISSLQPEDFATYYCQQSYSTLTFGGGTKVEIK

SEQ ID NO: 861 - protein, 106 aa, synthetic construct
  REGION 1..106: note = Synthetic construct
DIQMTQSPSSLSASVGDRVTITCRASQSISNYLNRYQQKPGEAPKLLIYAASSLESGVPSRFSGSGSGTDFTLTISSLQPEDFATYYCQQSYSTLTFGGGTKVEIK

SEQ ID NO: 862 - protein, 106 aa, synthetic construct; identical to SEQ ID NO: 709
  REGION 1..106: note = Synthetic construct

SEQ ID NO: 863 - protein, 80 aa, synthetic construct; identical to SEQ ID NO: 714
  REGION 1..80: note = Synthetic construct

SEQ ID NO: 864 - protein, 106 aa, synthetic construct
  REGION 1..106: note = Synthetic construct
DIQVTQSPSSLSASVGDRVTITCRASQSISSDLNWYQQKPGKAPKLLIYAASSLQSGVPSRFSGSGSGTDFTLTISSLQPEDFATYYCQQSYSTLTFGGGTKVEIK

SEQ ID NO: 865 - protein, 106 aa, synthetic construct
  REGION 1..106: note = Synthetic construct
DIQMTQSPSTLSASIGDRVTITCRASQSVSSWLAWYQQKPGKAPNLLIYKASDLETGVPSRFSGSGSRTEFTLTISSLQPEDFATYYCQQSYSTLTFGGGTKVEIK

SEQ ID NO: 866 - protein, 106 aa, synthetic construct; identical to SEQ ID NO: 704
  REGION 1..106: note = Synthetic construct

SEQ ID NO: 867 - protein, 80 aa, synthetic construct
  REGION 1..80: note = Synthetic construct
QGIRNDLGWYQQKPGKAPKLLIYAASSLQSGVPSRFSGSGSGTDFTLTISSLQPEDFATYYCQQSYSTLTFGGGTKVEIK

SEQ ID NO: 868 - protein, 106 aa, synthetic construct
  REGION 1..106: note = Synthetic construct
DIQMTQSPSSLSASVGDRVTITCRASQSISSYLNWYQQKPGKAPKLLIYAASSLQSGVPSRFSGSGSGTDFPLTISSLQPEDFATYYCQQSYSTLTFGGGTKVEIK

SEQ ID NO: 869 - protein, 106 aa, synthetic construct; identical to SEQ ID NO: 704
  REGION 1..106: note = Synthetic construct

SEQ ID NO: 870 - protein, 106 aa, synthetic construct
  REGION 1..106: note = Synthetic construct
DIQMTQSPSSLSASVGDRVTITCRASQSISDYLNWYQQKPGKAPKLLIFAASNLESGTPSRFSGSGSGTDFTLTISSLQPEDFATYYCQQSYSTLTFGGRTKVEIK

SEQ ID NO: 871 - protein, 106 aa, synthetic construct
  REGION 1..106: note = Synthetic construct
DIRMTQSPSSLSASVGDRVTITCRASQSISSYLNWYQQKPGKAPKLLIYAASSLQSGVPSRFSGSGSGTDFTLTISSLQPEDFATYYCQQSYSTLTFGGGTKVEIK

SEQ ID NO: 872 - protein, 106 aa, synthetic construct; identical to SEQ ID NO: 704
  REGION 1..106: note = Synthetic construct

SEQ ID NO: 873 - protein, 106 aa, synthetic construct; identical to SEQ ID NO: 718
  REGION 1..106: note = Synthetic construct

SEQ ID NO: 874 - protein, 106 aa, synthetic construct
  REGION 1..106: note = Synthetic construct
DIQMTQSPSSLSASVGDRVTITCRAGQSISNYLNWYQQKPGEAPKLLIYAASSLESGVPSRFSGSGSGTDFTLTISSLQPEDFATYYCQQSYSTLTFGGGTKVESK

SEQ ID NO: 875 - protein, 106 aa, synthetic construct; identical to SEQ ID NO: 704
  REGION 1..106: note = Synthetic construct

SEQ ID NO: 876 - protein, 74 aa, synthetic construct; identical to SEQ ID NO: 720
  REGION 1..74: note = Synthetic construct

SEQ ID NO: 877 - protein, 106 aa, synthetic construct; identical to SEQ ID NO: 704
  REGION 1..106: note = Synthetic construct

SEQ ID NO: 878 - protein, 80 aa, synthetic construct
  REGION 1..80: note = Synthetic construct
QSISSYLNWYQQKPGKAPKLLIYAASSLQSGVPSRFSGSGSGTDFTLTISSLQPEDLATYYCQQSYSTLTFGQGTRLEIK

SEQ ID NO: 879 - protein, 106 aa, synthetic construct
  REGION 1..106: note = Synthetic construct
DIQMTQSPSSLSASVGDRVTITCRASQRISSYLNWYQQKPGKAPKLLIYAASSLQSGVPSRFSGSGSGTDFTLTISSLQPEDFATYYCQQSYSTLTFGPGTKVDIK

SEQ ID NO: 880 - protein, 19 aa, synthetic construct
  REGION 1..19: note = Synthetic construct
CQQSYSTLTFGGGTKVEIK

SEQ ID NO: 881 - protein, 80 aa, synthetic construct; identical to SEQ ID NO: 841
  REGION 1..80: note = Synthetic construct

SEQ ID NO: 882 - protein, 106 aa, synthetic construct; identical to SEQ ID NO: 718
  REGION 1..106: note = Synthetic construct

SEQ ID NO: 883 - protein, 80 aa, synthetic construct
  REGION 1..80: note = Synthetic construct
QGISYYLAWYRQKPGRAPNLLIYGASTLQSGVPSRFNGSGSGTDFTLTISSLQPEDFATYYCQQSYSTLTFGGGTKVEIK

SEQ ID NO: 884 - protein, 19 aa, synthetic construct
  REGION 1..19: note = Synthetic construct
CQQSYSTLTFGGGTKVEIK

SEQ ID NO: 885 - protein, 106 aa, synthetic construct
  REGION 1..106: note = Synthetic construct
DIQMTQSPSSLSASVGDRVTITCRASQSISSYLNWYQQKPGKAPKLLIYAASSLQSGVPSRFSGSGSGTDFTLTISCLQPEDFATYYCQQSYSTLTFGQGTRLEIK

SEQ ID NO: 886 - protein, 106 aa, synthetic construct
  REGION 1..106: note = Synthetic construct
DIQMTQSPSSLSASVGDRVTITCRASQSISSYLNWYQQKPGKAPKLLIYAASSLQSGVPSRFSGSGSGTDFTLTISSLQPEDFATYYCQQSYSTLTFGQGTRLEMK

SEQ ID NO: 887 - protein, 106 aa, synthetic construct; identical to SEQ ID NO: 704
  REGION 1..106: note = Synthetic construct

SEQ ID NO: 888 - protein, 19 aa, synthetic construct
  REGION 1..19: note = Synthetic construct
CQQSYSTLTFGGGTKVEIK

SEQ ID NO: 889 - protein, 19 aa, synthetic construct
  REGION 1..19: note = Synthetic construct
CQQSYSTLTFGGGTKVEIK

SEQ ID NO: 890 - protein, 106 aa, synthetic construct; identical to SEQ ID NO: 704
  REGION 1..106: note = Synthetic construct

SEQ ID NO: 891 - protein, 106 aa, synthetic construct
  REGION 1..106: note = Synthetic construct
DIQMTQSPSSLSASVGDRVTITCRASQSISSYLNWYQQKPGKAPKLLIYAASSLQSGVPSRFSGSGSGTDFTLTINSLQPEDFATYYCQQSYSTLTFGGGTKVEIK

SEQ ID NO: 892 - protein, 106 aa, synthetic construct; identical to SEQ ID NO: 704
  REGION 1..106: note = Synthetic construct

SEQ ID NO: 893 - protein, 106 aa, synthetic construct; identical to SEQ ID NO: 704
  REGION 1..106: note = Synthetic construct

SEQ ID NO: 894 - protein, 57 aa, synthetic construct
  REGION 1..57: note = Synthetic construct
AASSLQSGVPSRFSGSGSGTDFTLTISSLQPEDFATYYCQQSYSTLTFGGGTKVEIK

SEQ ID NO: 895 - protein, 106 aa, synthetic construct; identical to SEQ ID NO: 704
  REGION 1..106: note = Synthetic construct

SEQ ID NO: 896 - protein, 106 aa, synthetic construct; identical to SEQ ID NO: 704
  REGION 1..106: note = Synthetic construct

SEQ ID NO: 897 - protein, 106 aa, synthetic construct; identical to SEQ ID NO: 704
  REGION 1..106: note = Synthetic construct

SEQ ID NO: 898 - protein, 106 aa, synthetic construct; identical to SEQ ID NO: 718
  REGION 1..106: note = Synthetic construct

SEQ ID NO: 899 - protein, 106 aa, synthetic construct
  REGION 1..106: note = Synthetic construct
DFQMTQSPSSLSASVGDRVTITCRASQSISSYLNWYQRKPGKAPKLLIYAASSLQSGVPSRFSGSGSGTDFTLTISSLQPEDFATYYCQQSYSTLTFVPGTKVDIK

SEQ ID NO: 900 - protein, 106 aa, synthetic construct; identical to SEQ ID NO: 735
  REGION 1..106: note = Synthetic construct

SEQ ID NO: 901 - protein, 57 aa, synthetic construct; identical to SEQ ID NO: 894
  REGION 1..57: note = Synthetic construct

SEQ ID NO: 902 - protein, 106 aa, synthetic construct; identical to SEQ ID NO: 718
  REGION 1..106: note = Synthetic construct

SEQ ID NO: 903 - protein, 106 aa, synthetic construct
  REGION 1..106: note = Synthetic construct
DIQMTQSPSSLSASVGDRVAITCRASQSISSYLNWYQQKPGKAPKLLIYAASSLQSGVPSRFSGSGSGTDFTLTISSLQPEDFATYYCQQSYSTLTFGQGTRLEIK

SEQ ID NO: 904 - protein, 106 aa, synthetic construct; identical to SEQ ID NO: 719
  REGION 1..106: note = Synthetic construct

SEQ ID NO: 905 - protein, 106 aa, synthetic construct
  REGION 1..106: note = Synthetic construct
DIQMTQSPSSLSASVGDRVTITCRASQSISNYLNWYQQKPGEAPKLLIYAASSLESGVPSRFSGSGSGTDFTLTTSSLQPEDFATYYCQQSYSTLTFGGGTKVEIK

SEQ ID NO: 906 - protein, 106 aa, synthetic construct
  REGION 1..106: note = Synthetic construct
DIQMTQSPSSLSASVGDRVTITCRASQSISSYLNWYQQKPGKALKLLIYAASSLQSGVPSRFSGSGSGTDFTLTISSLQPEDFATYYCQQSYSTLTFGGGSKVEIK

SEQ ID NO: 907 - protein, 106 aa, synthetic construct; identical to SEQ ID NO: 704
  REGION 1..106: note = Synthetic construct

SEQ ID NO: 908 - protein, 106 aa, synthetic construct
  REGION 1..106: note = Synthetic construct
DIQMTQSPSSLSASVGDRVTITCRASQSISSYLNWYQQKPGKAPKLLIYAASSLQSGVPSRFSGSGSGTDFTLTISSLQPEDFATYYCQQSYSTLTFGPRTKVDIK

SEQ ID NO: 909 - protein, 106 aa, synthetic construct; identical to SEQ ID NO: 704
  REGION 1..106: note = Synthetic construct

SEQ ID NO: 910 - protein, 106 aa, synthetic construct; identical to SEQ ID NO: 709
  REGION 1..106: note = Synthetic construct

SEQ ID NO: 911 - protein, 106 aa, synthetic construct; identical to SEQ ID NO: 735
  REGION 1..106: note = Synthetic construct

SEQ ID NO: 912 - protein, 106 aa, synthetic construct; identical to SEQ ID NO: 704
  REGION 1..106: note = Synthetic construct

SEQ ID NO: 913 - protein, 106 aa, synthetic construct; identical to SEQ ID NO: 704
  REGION 1..106: note = Synthetic construct

SEQ ID NO: 914 - protein, 106 aa, synthetic construct; identical to SEQ ID NO: 704
  REGION 1..106: note = Synthetic construct

SEQ ID NO: 915 - protein, 80 aa, synthetic construct; identical to SEQ ID NO: 714
  REGION 1..80: note = Synthetic construct

SEQ ID NO: 916 - protein, 106 aa, synthetic construct; identical to SEQ ID NO: 704
  REGION 1..106: note = Synthetic construct

SEQ ID NO: 917 - protein, 106 aa, synthetic construct; identical to SEQ ID NO: 719
  REGION 1..106: note = Synthetic construct

SEQ ID NO: 918 - protein, 106 aa, synthetic construct; identical to SEQ ID NO: 860
  REGION 1..106: note = Synthetic construct

SEQ ID NO: 919 - protein, 106 aa, synthetic construct
  REGION 1..106: note = Synthetic construct
DIQMTQSPSSLSASVGDRVTITCRATQSISSYLNWYQQKPGKAPKLLIYAASSLQSGVPSRFSGSGSGTEFTLTISSLQPEDFATYYCQQSYSTLTFGQGTKVEIK

SEQ ID NO: 920 - protein, 106 aa, synthetic construct
  REGION 1..106: note = Synthetic construct
DIQMTQSPSSLSASVGDRVTITCRASQSISSYLNWYQQKPGKAPKLPIYAASSLQSGVPSRFSGSGSGTDFTLTISSLQPEDFATYYCQQSYSTLTFGGGTKVEIK

SEQ ID NO: 921 - protein, 106 aa, synthetic construct; identical to SEQ ID NO: 735
  REGION 1..106: note = Synthetic construct

SEQ ID NO: 922 - protein, 106 aa, synthetic construct
  REGION 1..106: note = Synthetic construct
DIQMTQSPSTLSASVGDRVTITCRASQNVFTWLAWYQQKPGKAPRLLIYKASILESGVPSRFSGSGSGTDFTLTISSLQPEDFATYYCQQSYSTLTFGPGTKVDIK

SEQ ID NO: 923 - protein, 106 aa, synthetic construct; identical to SEQ ID NO: 704
  REGION 1..106: note = Synthetic construct

SEQ ID NO: 924 - protein, 106 aa, synthetic construct
  REGION 1..106: note = Synthetic construct
DIQMTQSPSSLSASVGDRVTITCRASQSISSYLNWYQQIPGKAPKLLIYAASSLQSGVPSRFSGSGSGTDFTLTISSLQPEDFATYYCQQSYSTLTFGGGTKVEIK

SEQ ID NO: 925 - protein, 106 aa, synthetic construct; identical to SEQ ID NO: 718
  REGION 1..106: note = Synthetic construct

SEQ ID NO: 926 - protein, 106 aa, synthetic construct
  REGION 1..106: note = Synthetic construct
DIQMTQSPSSLSASVGDRVTITCRASQSISSYLNWYQQKPGKAPKLLIYAASSLQSGVPSRFSGSGSGTDFTLTISSLQPEDCATYYCQQSYSTLTFGGGTKVEIK

SEQ ID NO: 927 - protein, 106 aa, synthetic construct
  REGION 1..106: note = Synthetic construct
DIQMTQSPTSLSASVGDRVTITCRASQSITTYLNWYQQKPGKAPRLLIYTASSLQSGVPSRFSGSGSGTDFTLTISSLQLEDFATYYCQQSYSTLTFGPGTKVDIK

SEQ ID NO: 928 - protein, 106 aa, synthetic construct; identical to SEQ ID NO: 704
  REGION 1..106: note = Synthetic construct

SEQ ID NO: 929 - protein, 106 aa, synthetic construct
  REGION 1..106: note = Synthetic construct
DIQMTQSPPSLSASVGDRVTITCRASQSISSYLNWYQQKPGKAPKLLIYAASSLQSGVPSRFSGSGSGTDFTLTISSLQPEDFATYYCQQSYSTLTFGPGTKVEIK

SEQ ID NO: 930 - protein, 106 aa, synthetic construct; identical to SEQ ID NO: 704
  REGION 1..106: note = Synthetic construct

SEQ ID NO: 931 - protein, 53 aa, synthetic construct
  REGION 1..53: note = Synthetic construct
FQSGVPSRFGGSGSGTDFTLTISSLQPEDFATYYCQQSYSTLTFGGGTEVEIK

SEQ ID NO: 932 - protein, 80 aa, synthetic construct
  REGION 1..80: note = Synthetic construct
QSINSYLNWYQQKPGKAPRLLIHGTSTLQSGVPSTFSGSGSGTDFTLTINNLQPEDFATYYCQQSYSTLTFGGGTKVEIK

SEQ ID NO: 933 - protein, 106 aa, synthetic construct; identical to SEQ ID NO: 704
  REGION 1..106: note = Synthetic construct

SEQ ID NO: 934 - protein, 57 aa, synthetic construct; identical to SEQ ID NO: 820
  REGION 1..57: note = Synthetic construct

SEQ ID NO: 935 - protein, 106 aa, synthetic construct
  REGION 1..106: note = Synthetic construct
DIQMTQSPSSLSASVGDRVTITCRASQSISNYLNWYQQKPGEAPKLLIYAASSLESGVPSRFSGSGSGTDFTLTISSLQPEDLATYYCQQSYSTLTFGGGTKVEIK

SEQ ID NO: 936 - protein, 105 aa, synthetic construct
  REGION 1..105: note = Synthetic construct
DIQMTQSPSSLSASVGDRVTITCRASQSISSYLNWYQQKPGKAPKLLIYAASSLQSGVPSRFSGSGSGTDFTLTISSLQPVDFATYYCQQSYSTLTFGGGTKVEI

SEQ ID NO: 937 - protein, 106 aa, synthetic construct; identical to SEQ ID NO: 719
  REGION 1..106: note = Synthetic construct

SEQ ID NO: 938 - protein, 106 aa, synthetic construct; identical to SEQ ID NO: 735
  REGION 1..106: note = Synthetic construct

SEQ ID NO: 939 - protein, 106 aa, synthetic construct; identical to SEQ ID NO: 704
  REGION 1..106: note = Synthetic construct

SEQ ID NO: 940 - protein, 106 aa, synthetic construct; identical to SEQ ID NO: 704
  REGION 1..106: note = Synthetic construct

SEQ ID NO: 941 - protein, 106 aa, synthetic construct
  REGION 1..106: note = Synthetic construct
DIQMTQSPSSLSASVGDRVTVTCRASQNISNYLNWYQQKPGKAPKFLIYAASSLQSGVPSRFSGSGSGTDFTLTISSLQPEDFATYYCQQSYSTLTFGQGTRLEIK

SEQ ID NO: 942 - protein, 106 aa, synthetic construct; identical to SEQ ID NO: 719
  REGION 1..106: note = Synthetic construct

SEQ ID NO: 943 - protein, 106 aa, synthetic construct; identical to SEQ ID NO: 704
  REGION 1..106: note = Synthetic construct

SEQ ID NO: 944 - protein, 80 aa, synthetic construct
  REGION 1..80: note = Synthetic construct
QSISSYLNWYQQKPGKAPKLLIYAASSLQSGVPSRFSGSGSGTDFTLTISSLQPEDFATYYCQQSYSTLTFGQGTRLEIK

SEQ ID NO: 945 - protein, 106 aa, synthetic construct
  REGION 1..106: note = Synthetic construct
DIQMTQSPSSLSASVGDRVTITCRASQSISNYLNWYQQKPGKAPKLLIYAASSLQSGVPSRFSGSGSGTDFTLTISSLQPEDIATYYCQQSYNTLTFGPGTKVDIK

SEQ ID NO: 946 - protein, 106 aa, synthetic construct
  REGION 1..106: note = Synthetic construct
DIQMTQSPSSLSASVGDRGKRMCRASQSISNYVNWYQQKPGKAPKLLIYAASSLQSGVPSRFSGSGSGTDFTLTISTLQPDDIATYYCQQSYNTLTFGPGTKVDIK

SEQ ID NO: 947 - protein, 106 aa, synthetic construct; identical to SEQ ID NO: 234
  REGION 1..106: note = Synthetic construct

SEQ ID NO: 948 - protein, 106 aa, synthetic construct
  REGION 1..106: note = Synthetic construct
DIQMTQSPSSLSASVGDRVTITCRASQSISSYLNWYQQKPGKAPKVLIYAASSLQSGVPSRFSGSGSGADFTLTINSLQPEDFATYYCQQSYTTLTFGGGTKVEIK

SEQ ID NO: 949 - protein, 106 aa, synthetic construct
  REGION 1..106: note = Synthetic construct
DIQMTQSPSSVSASVGDRVTITCRASQDIGTWLAWYQQRPGRAPELLIYAASKLRSGVPSRFSGSGSGTDFTLTITSLKPEDFATYYCQQSYTTLTFGGGTKVEIK

SEQ ID NO: 950 - protein, 106 aa, synthetic construct; identical to SEQ ID NO: 948
  REGION 1..106: note = Synthetic construct

SEQ ID NO: 951 - protein, 106 aa, synthetic construct
  REGION 1..106: note = Synthetic construct
DIQMTQSPSSLSASVGDRVTITCRASQSISSYLNWYQQKPGKAPKVLTYAASSLQSGVPSRFSGSGSGADFTLTINSLQPEDFATYYCQQSYTTLTFGGGTKVEIK

SEQ ID NO: 952 - protein, 106 aa, synthetic construct; identical to SEQ ID NO: 948
  REGION 1..106: note = Synthetic construct

SEQ ID NO: 953 - protein, 106 aa, synthetic construct; identical to SEQ ID NO: 948
  REGION 1..106: note = Synthetic construct

SEQ ID NO: 954 - protein, 106 aa, synthetic construct; identical to SEQ ID NO: 948
  REGION 1..106: note = Synthetic construct

SEQ ID NO: 955 - protein, 106 aa, synthetic construct
  REGION 1..106: note = Synthetic construct
DIQMTQSPSSLSASVGDRVTITCRASQSISSYLNWYQQKPGKAPKVLIYAASSLQSGVPSRFSGSGSGADFTLTINSLQPEDFATYYCQQSYTTLTFGGGTKVETK

SEQ ID NO: 956 - protein, 106 aa, synthetic construct
  REGION 1..106: note = Synthetic construct
DIQMTQSPSSLSASVGDRVTITCRASQSISSYLNWYQQKPGKAPKVLIYAASSLQSGVPSRFSGSGSGADFTLTINGLQPEDFATYYCQQSYTTLTFGGGTKVEIK

SEQ ID NO: 957 - protein, 106 aa, synthetic construct; identical to SEQ ID NO: 948
  REGION 1..106: note = Synthetic construct

SEQ ID NO: 958 - protein, 106 aa, synthetic construct; identical to SEQ ID NO: 948
  REGION 1..106: note = Synthetic construct

SEQ ID NO: 959 - protein, 106 aa, synthetic construct; identical to SEQ ID NO: 948
  REGION 1..106: note = Synthetic construct

SEQ ID NO: 960 - protein, 106 aa, synthetic construct; identical to SEQ ID NO: 948
  REGION 1..106: note = Synthetic construct

SEQ ID NO: 961 - protein, 106 aa, synthetic construct
  REGION 1..106: note = Synthetic construct
DIQMTQSPSSLSASVGDRVTITCRASQSISNYLNWYQQKPGEAPKLLIYAASSLESGVPSRFSGSGSGTDFTLTISSLQPEDFATYYCQQSYTTLTFGGGTKVEIK

SEQ ID NO: 962 - protein, 106 aa, synthetic construct; identical to SEQ ID NO: 948
  REGION 1..106: note = Synthetic construct

SEQ ID NO: 963 - protein, 19 aa, synthetic construct
  REGION 1..19: note = Synthetic construct
CQQSYTTLTFGGGTKVEIK

SEQ ID NO: 964 - protein, 106 aa, synthetic construct; identical to SEQ ID NO: 238
  REGION 1..106: note = Synthetic construct

SEQ ID NO: 965 - protein, 79 aa, synthetic construct
  REGION 1..79: note = Synthetic construct
QDISAHLAWYQKKPGEAPKPLIYSASNLQSGVPSRFSGSGSGTEFTLIISSLQPEDFATYYCQQSYIAPTFGPGTNVDI

SEQ ID NO: 966 - protein, 105 aa, synthetic construct
  REGION 1..105: note = Synthetic construct
DIQMTQSPSSLSASVGDRVTITCRASQSISNYLNWYQQKPGKAPRLLIYAASNLQSGVPSRFSGSGSGTDFTLVISSLQPEDFATYYCQQSYIAPTFGPGTKVDI

SEQ ID NO: 967 - protein, 105 aa, synthetic construct; identical to SEQ ID NO: 966
  REGION 1..105: note = Synthetic construct

SEQ ID NO: 968 - protein, 105 aa, synthetic construct
  REGION 1..105: note = Synthetic construct
DIQMTQSPSSLSASVGDRVTLTCQASQDITHYLNWYQQKPGKAPNLLIYDASNLETGVPSRFSGSGSGTDFTLIISSLQPEDFATYYCQQSYIAPTFGPGTNVDI

SEQ ID NO: 969 - protein, 105 aa, synthetic construct
  REGION 1..105: note = Synthetic construct
DIQMTQSPSSLSASVGDRVTITCRASQSISNYLNWYQQKPGKAPRLLIYAASNLQSGVPSRFSGSGSGTDFTFVISSLQPEDFATYYCQQSYIAPTFGPGTKVDI

SEQ ID NO: 970 - protein, 106 aa, synthetic construct
  REGION 1..106: note = Synthetic construct
EVVLTQSPDFQSVTPKEKVTITCRASQSIGTNLHWYQRKPDQSPHLLIKYASQSMSGVPSRFSGSGSGTDFTLTISSLQPEDFATYFCQQSYNAGTFGQGTKVEIK

SEQ ID NO: 971 - protein, 106 aa, synthetic construct
  REGION 1..106: note = Synthetic construct
DIQMTQSPSSLSASVGDRVTIACRASQSISSYLNWYQQKPGKAPKLLIYAASGLQSGVPSRFSGSGPGTDFTLTISSLQPEDFATYFCQQSYNAGTFGQGTKVEIK

SEQ ID NO: 972 - protein, 106 aa, synthetic construct
  REGION 1..106: note = Synthetic construct
DIQMTQSPSSLSASVGDRVTITCRASQTIISYLNWYQQKAGKAPKLLIHAASSLQSGVPSRFSGSGSGTDFTLTISSLQPEDFATYYCQQSYITRTFGQGTKAEIK

SEQ ID NO: 973 - protein, 73 aa, synthetic construct
  REGION 1..73: note = Synthetic construct
LNWYQQKPGKAPTLLIYAASSLQFGVPSRFSGSGSGTHFTLTISSLQPEDFAAYYCQQSYGTATFGQGTKLEI

SEQ ID NO: 974 - protein, 106 aa, synthetic construct
  REGION 1..106: note = Synthetic construct
DIQMTQSPPSLSASVGDRVTIACRASQSISTYLNWYQQKPGKAPKLLIYAASSLLSGVPSRFSGSGSGTDFTLTISSLQPEDFATYYCQQSYRTLTFGPGTKVDIK

SEQ ID NO: 975 - protein, 106 aa, synthetic construct
  REGION 1..106: note = Synthetic construct
DIQMTQSPPSLSASVGDRVTIASRASQSISTYLNWYQQKPGKAPKLLIYAASSLLSGVPSRFSGSGSGTDFTLTISSLQPEDFATYYCQQSYRTLTFGPGTKVDIK

SEQ ID NO: 976 - protein, 107 aa, synthetic construct; identical to SEQ ID NO: 242
  REGION 1..107: note = Synthetic construct

SEQ ID NO: 977 - protein, 107 aa, synthetic construct
  REGION 1..107: note = Synthetic construct
EIVLTQSPDFQSVAPKEKVTITCRASQSIVTSLHWYQQKAGQSPRLLIKYASQSISGVPSRFSGSGSGTDFTLTISSLEAEDAAAYYCHQSTSLPYSFGQGTKLEIK

SEQ ID NO: 978 - protein, 107 aa, synthetic construct
  REGION 1..107: note = Synthetic construct
EIVLTQSPEFQPVTPKETLTITCRASEYIGTSLHWYQKKPDQSPKLLIKDASQSISGVPSRFSGSGSGTDFTLTINGLEPEDIATYYCHQSYSLPFAFGQGTKLEIK

SEQ ID NO: 979 - protein, 107 aa, synthetic construct; identical to SEQ ID NO: 978
  REGION 1..107: note = Synthetic construct

SEQ ID NO: 980 - protein, 107 aa, synthetic construct; identical to SEQ ID NO: 978
  REGION 1..107: note = Synthetic construct

SEQ ID NO: 981 - protein, 107 aa, synthetic construct; identical to SEQ ID NO: 978
  REGION 1..107: note = Synthetic construct

SEQ ID NO: 982 - protein, 107 aa, synthetic construct; identical to SEQ ID NO: 978
  REGION 1..107: note = Synthetic construct

SEQ ID NO: 983 - protein, 107 aa, synthetic construct
  REGION 1..107: note = Synthetic construct
EIVLTQSPDFQSVTPKEKVTITCRASQSIGSSLHWYQQKPDQSPKLLIKYASQSISGVPSRFSGSGSGTDFTLTINSLEAEDAATYYCHQSSSLPFAFGQGTRLEIK

SEQ ID NO: 984 - protein, 81 aa, synthetic construct; identical to SEQ ID NO: 350
  REGION 1..81: note = Synthetic construct

SEQ ID NO: 985 - protein, 107 aa, synthetic construct
  REGION 1..107: note = Synthetic construct
EVVLTQSPDFQSVTPKENVTITCRASQSIGSSLHWYQQKPDQSPKLLIKYASQSISGVPSRFSGSGSGTDFTLTINSLEAEDAAAYYCHQSGSLPFTFGGGTKVEIK

SEQ ID NO: 986 - protein, 107 aa, synthetic construct; identical to SEQ ID NO: 985
  REGION 1..107: note = Synthetic construct

SEQ ID NO: 987 - protein, 81 aa, synthetic construct
  REGION 1..81: note = Synthetic construct
QSIGSSLHWYQQKPDQSPKLLIKYASQSISGVPSRFSGSGSGTDFTLTINSLEAEDAAAYYCHQSGSLPFTFGGGTKVEIK

SEQ ID NO: 988 - protein, 106 aa, synthetic construct
  REGION 1..106: note = Synthetic construct
EVVLTQSPDFQSVTPKENVTITCRASQSIGSSLHWYQQKPDQSPKLLTKYASQSISGVPSRFSGSGSGTDFTLTINSLEAEDAAAYYCHQSGSLPFTFGGGTKVEI

SEQ ID NO: 989 - protein, 80 aa, synthetic construct
  REGION 1..80: note = Synthetic construct
QSIGSSLHWYQQKPDHSPKLLIKSASQSFSGVPSRFSGSGSGTDFTLTINSLEPEDAATYYCHQSSSLPFTFGQGTKLEI

SEQ ID NO: 990 - protein, 107 aa, synthetic construct
  REGION 1..107: note = Synthetic construct
EIVLTQSPDFQSVTPKEKVTITCRASQSIGSSLHWYQQKPDQSPKLLIKYASQSISGVPSRFSGSGSGTDFTLTINSLEAEDAAAYYCHQSSSLPFTFGPGTKVDIK

SEQ ID NO: 991 - protein, 107 aa, synthetic construct
  REGION 1..107: note = Synthetic construct
EIVLTQSPDFQSVTPKDKVTITCRASQSIGSSLHWYQQKPDQSPKLLIKSASQSFSGVPSRFSGSGSGTDFTLTINSLEPEDAATYYCHQSSSLPFTFGQRTKLEIK

SEQ ID NO: 992 - protein, 107 aa, synthetic construct
  REGION 1..107: note = Synthetic construct
EIVLTQSPDFLSVTPKDKVTITCRASQSIGSSLHWYQQKPDQSPKLLIKSASQSFSGVPSRFSGSGSGTDFTLTINSLEPEDAATYYCHQSSSLPFTFGQGTKLETK

SEQ ID NO: 993 - protein, 107 aa, synthetic construct
  REGION 1..107: note = Synthetic construct
EIVLTQSPDFQSVTPKDKVTITCRASQSIGSSLHWYQQKPDQSPKLLIKSASQPFSGVPSRFSGSGSGTDFTLTINSLEPEDAATYYCHQSSSLPFTFGQGTKLEIK

SEQ ID NO: 994 - protein, 107 aa, synthetic construct; identical to SEQ ID NO: 263
  REGION 1..107: note = Synthetic construct

SEQ ID NO: 995 - protein, 106 aa, synthetic construct
  REGION 1..106: note = Synthetic construct
EIVLTQSPDFQSVTPKDKVTITCRSQSIGSSLHWYQQKSDQSPKLLIKSASQSFSGVPSRFSGSGSGTDFTLTINSLEPEDAATYYCHQSSSLPFTFGQGTKLEIK

SEQ ID NO: 996 - protein, 107 aa, synthetic construct; identical to SEQ ID NO: 264
  REGION 1..107: note = Synthetic construct

SEQ ID NO: 997 - protein, 107 aa, synthetic construct; identical to SEQ ID NO: 265
  REGION 1..107: note = Synthetic construct

SEQ ID NO: 998 - protein, 78 aa, synthetic construct; identical to SEQ ID NO: 266
  REGION 1..78: note = Synthetic construct

SEQ ID NO: 999 - protein, 81 aa, synthetic construct
  REGION 1..81: note = Synthetic construct
QNIGSSLHWYQQKPGQSPKLLIRFASQSISGVPSRFSGSGSGTAFTLTISSLEAEDVATYYCHQSSSLPFTFGGGTKVEIK

SEQ ID NO: 1000 - protein, 107 aa, synthetic construct
  REGION 1..107: note = Synthetic construct
EIVLTQSPDFQSVTPKDKVTITCRASQSIGSSLHWYQQKLDQSPKLLIKSASQSFSGVPSRFSGSGSGTDFTLTINSLEPEDAATYYCHQSSSLPFTFGQGTKLEIK

SEQ ID NO: 1001 - protein, 107 aa, synthetic construct; identical to SEQ ID NO: 265
  REGION 1..107: note = Synthetic construct

SEQ ID NO: 1002 - protein, 107 aa, synthetic construct
  REGION 1..107: note = Synthetic construct
EIVLTQSPDFQSVTPKDKVTITCRASQSIGSSLHWYQQKPDQSPKLLIKSASQSFSGVPSRFSGSGSGTDFTRTINSLEPEDAATYYCHQSSSLPFTFGQGTKLEIK

SEQ ID NO: 1003 - protein, 107 aa, synthetic construct; identical to SEQ ID NO: 268
  REGION 1..107: note = Synthetic construct

SEQ ID NO: 1004 - protein, 107 aa, synthetic construct; identical to SEQ ID NO: 265
  REGION 1..107: note = Synthetic construct

SEQ ID NO: 1005 - protein, 107 aa, synthetic construct; identical to SEQ ID NO: 265
  REGION 1..107: note = Synthetic construct

SEQ ID NO: 1006 - protein, 81 aa, synthetic construct; identical to SEQ ID NO: 271
  REGION 1..81: note = Synthetic construct

SEQ ID NO: 1007 - protein, 107 aa, synthetic construct
  REGION 1..107: note = Synthetic construct
EIVLTQSPDFQSVTPKDKVTITCRASQSIGSSLHWYQQKPDQSPKLLIKSASQSFSGVPSRFSGSGSGTDFTLTINSLEPEDAATYYCHQSSSLPFTFGQGTKLEIK

SEQ ID NO: 1008 - protein, 107 aa, synthetic construct; identical to SEQ ID NO: 1007
  REGION 1..107: note = Synthetic construct

SEQ ID NO: 1009 - protein, 107 aa, synthetic construct; identical to SEQ ID NO: 272
  REGION 1..107: note = Synthetic construct

SEQ ID NO: 1010 - protein, 107 aa, synthetic construct; identical to SEQ ID NO: 273
  REGION 1..107: note = Synthetic construct

SEQ ID NO: 1011 - protein, 107 aa, synthetic construct; identical to SEQ ID NO: 272
  REGION 1..107: note = Synthetic construct

SEQ ID NO: 1012 - protein, 107 aa, synthetic construct; identical to SEQ ID NO: 275
  REGION 1..107: note = Synthetic construct

SEQ ID NO: 1013 - protein, 107 aa, synthetic construct
  REGION 1..107: note = Synthetic construct
EIVLIQSPDFQSVTPKDKVTITCRASQSIGSSLHWYQQKPDQSPKLLIKSASQSFSGVPSRFSGSGSGTDFTLTINSLEPEDAATYYCHQSSSLPFTFGQGTKLEIK

SEQ ID NO: 1014 - protein, 107 aa, synthetic construct; identical to SEQ ID NO: 1007
  REGION 1..107: note = Synthetic construct

SEQ ID NO: 1015 - protein, 107 aa, synthetic construct; identical to SEQ ID NO: 1007
  REGION 1..107: note = Synthetic construct

SEQ ID NO: 1016 - protein, 107 aa, synthetic construct
  REGION 1..107: note = Synthetic construct
EIVLTQSPDFQSVTPKDKVTITCRASQSIGSSLHWYQQKPDQSPKLLIKSASQSFSGVPSRFSGSGSGTDFTLTINSLEPEDAVTYYCHQSSSLPFTFGQGTKLEIK

SEQ ID NO: 1017 - protein, 107 aa, synthetic construct
  REGION 1..107: note = Synthetic construct
EIVLTQSPDFQSVTPKEKVTITCRASQSIGSSLHWYQQKPDQSPKLLIKYASQSISGVPSRFSGSGSGTDFTLTINSLEAEDAATYYCHQSSSLPFTFGGGTKVEIK

SEQ ID NO: 1018 - protein, 107 aa, synthetic construct; identical to SEQ ID NO: 276
  REGION 1..107: note = Synthetic construct

SEQ ID NO: 1019 - protein, 107 aa, synthetic construct; identical to SEQ ID NO: 1007
  REGION 1..107: note = Synthetic construct

SEQ ID NO: 1020 - protein, 107 aa, synthetic construct
  REGION 1..107: note = Synthetic construct
EIVLTQSPDFQSVTPKEKVTVTCRASQSIGSSLHWYQQKPDQSPKLLIKYASQSISGVPSRFSGSGSGTEFTLTINNLEAEDAAAYYCHQSSSLPFTFGGGTKVEIK

SEQ ID NO: 1021 - protein, 107 aa, synthetic construct; identical to SEQ ID NO: 265
  REGION 1..107: note = Synthetic construct

SEQ ID NO: 1022 - protein, 107 aa, synthetic construct
  REGION 1..107: note = Synthetic construct
EIVLTQSPDFQSVTPKEKVTITCRASQSIGSSLHWYQQKPDQSPKLLIKYASQSFSGVPSRFSGSGSGTDFTLTINSLEAEDAATYYCHQSSSLPFTFGGGTKVEIK

SEQ ID NO: 1023 - protein, 81 aa, synthetic construct
  REGION 1..81: note = Synthetic construct
QSIGSSLHWYQQKPDQSPKLLIKSASQSFSGVPSRFSGSGSGTDFTLTINSLEPEDAATYYCHQSSSLPFTFGQGTKLESK

SEQ ID NO: 1024 - protein, 107 aa, synthetic construct; identical to SEQ ID NO: 278
  REGION 1..107: note = Synthetic construct

SEQ ID NO: 1025 - protein, 107 aa, synthetic construct; identical to SEQ ID NO: 265
  REGION 1..107: note = Synthetic construct

SEQ ID NO: 1026 - protein, 107 aa, synthetic construct; identical to SEQ ID NO: 275
  REGION 1..107: note = Synthetic construct

SEQ ID NO: 1027 - protein, 107 aa, synthetic construct; identical to SEQ ID NO: 1007
  REGION 1..107: note = Synthetic construct

SEQ ID NO: 1028 - protein, 107 aa, synthetic construct; identical to SEQ ID NO: 1007
  REGION 1..107: note = Synthetic construct

SEQ ID NO: 1029 - protein, 107 aa, synthetic construct
  REGION 1..107: note = Synthetic construct
AIRMTQSPSPLSASTGDRVTITCRASQHISSYLAWYQQKPGKAPRLLIYSASTLQSGVPSRFSGSGSGTDFTLTINSLEPEDAATYYCHQSSSLPFTFGQGTKLEIK

SEQ ID NO: 1030 - protein, 107 aa, synthetic construct; identical to SEQ ID NO: 1007
  REGION 1..107: note = Synthetic construct

SEQ ID NO: 1031 - protein, 81 aa, synthetic construct; identical to SEQ ID NO: 281
  REGION 1..81: note = Synthetic construct

SEQ ID NO: 1032 - protein, 107 aa, synthetic construct; identical to SEQ ID NO: 265
  REGION 1..107: note = Synthetic construct

SEQ ID NO: 1033 - protein, 107 aa, synthetic construct; identical to SEQ ID NO: 272
  REGION 1..107: note = Synthetic construct

SEQ ID NO: 1034 - protein, 81 aa, synthetic construct; identical to SEQ ID NO: 271
  REGION 1..81: note = Synthetic construct

SEQ ID NO: 1035 - protein, 107 aa, synthetic construct; identical to SEQ ID NO: 285
  REGION 1..107: note = Synthetic construct

SEQ ID NO: 1036 - protein, 81 aa, synthetic construct; identical to SEQ ID NO: 286
  REGION 1..81: note = Synthetic construct

SEQ ID NO: 1037 - protein, 107 aa, synthetic construct; identical to SEQ ID NO: 1007
  REGION 1..107: note = Synthetic construct

SEQ ID NO: 1038 - protein, 107 aa, synthetic construct; identical to SEQ ID NO: 1007
  REGION 1..107: note = Synthetic construct

SEQ ID NO: 1039 - protein, 107 aa, synthetic construct; identical to SEQ ID NO: 264
  REGION 1..107: note = Synthetic construct

SEQ ID NO: 1040 - protein, 107 aa, synthetic construct; identical to SEQ ID NO: 288
  REGION 1..107: note = Synthetic construct

SEQ ID NO: 1041 - protein, 107 aa, synthetic construct; identical to SEQ ID NO: 289
  REGION 1..107: note = Synthetic construct

SEQ ID NO: 1042 - protein, 107 aa, synthetic construct
  REGION 1..107: note = Synthetic construct
EIVLTQSPDFQSVTPKDKVTITCRASQSIGSSLHWYQQKPDQSPKLLIKSASQSFSGVPSRFSGSGSGTDFTLTINSLEPEGAATYYCHQSSSLPFTFGQGTKLEIK

SEQ ID NO: 1043 - protein, 107 aa, synthetic construct
  REGION 1..107: note = Synthetic construct
EIVLTQSPDFQSVTPKDKVTITCRARQSIGSSLHWYQQKPDQSPKLLIKSASQSFSGVPSRFSGSGSGTDFTLTINSLEPEDAATYYCHQSSSLPFTFGQGTKLEIK

SEQ ID NO: 1044 - protein, 107 aa, synthetic construct; identical to SEQ ID NO: 1007
  REGION 1..107: note = Synthetic construct

SEQ ID NO: 1045 - protein, 107 aa, synthetic construct; identical to SEQ ID NO: 272
  REGION 1..107: note = Synthetic construct

SEQ ID NO: 1046 - protein, 107 aa, synthetic construct; identical to SEQ ID NO: 291
  REGION 1..107: note = Synthetic construct

SEQ ID NO: 1047 - protein, 107 aa, synthetic construct; identical to SEQ ID NO: 1007
  REGION 1..107: note = Synthetic construct

SEQ ID NO: 1048 - protein, 20 aa, synthetic construct
  REGION 1..20: note = Synthetic construct
CHQSSSLPFTFGPGTKVDIK

SEQ ID NO: 1049 - protein, 81 aa, synthetic construct; identical to SEQ ID NO: 293
  REGION 1..81: note = Synthetic construct

SEQ ID NO: 1050 - protein, 107 aa, synthetic construct
  REGION 1..107: note = Synthetic construct
EVVLTQSPESQSVTPKETVTITCRASQNIGSSLHWYQQKPGQSPKLLIRFASQSISGVPSRFSGSGSGTAFTLTISSLEAEDVATYYCHQSSSLPFTFGGGTKVEIK

SEQ ID NO: 1051 - protein, 20 aa, synthetic construct
  REGION 1..20: note = Synthetic construct
CHQSSSLPFTFGPGTKLDLK

SEQ ID NO: 1052 - protein, 107 aa, synthetic construct; identical to SEQ ID NO: 295
  REGION 1..107: note = Synthetic construct

SEQ ID NO: 1053 - protein, 107 aa, synthetic construct; identical to SEQ ID NO: 1007
  REGION 1..107: note = Synthetic construct

SEQ ID NO: 1054 - protein, 107 aa, synthetic construct; identical to SEQ ID NO: 264
  REGION 1..107: note = Synthetic construct

SEQ ID NO: 1055 - protein, 107 aa, synthetic construct; identical to SEQ ID NO: 275
  REGION 1..107: note = Synthetic construct

SEQ ID NO: 1056 - protein, 107 aa, synthetic construct; identical to SEQ ID NO: 265
  REGION 1..107: note = Synthetic construct

SEQ ID NO: 1057 - protein, 107 aa, synthetic construct; identical to SEQ ID NO: 299
  REGION 1..107: note = Synthetic construct

SEQ ID NO: 1058 - protein, 107 aa, synthetic construct; identical to SEQ ID NO: 1007
  REGION 1..107: note = Synthetic construct

SEQ ID NO: 1059 - protein, 80 aa, synthetic construct
  REGION 1..80: note = Synthetic construct
QSIGTSLHWYQQKPDQSPKLLIKYASQSFSGVPSRFSGSGSGADFTLTINSLEAEDAATYFCHQSSSLPFTFGGGTRVEI

SEQ ID NO: 1060 - protein, 107 aa, synthetic construct
  REGION 1..107: note = Synthetic construct
EIVLTQSPDFQSVTPKDKVTITCRASQSIGSSLHWYQQKPDQSPKLLIKSASQSFSGVPSRFSGSGSGTDFTLTINSLEPEDAAPYYCHQSSSLPFTFGQGTKLEIK

SEQ ID NO: 1061 - protein, 107 aa, synthetic construct
  REGION 1..107: note = Synthetic construct
EIVLTQSPDFQSVTPKEKVTITCRASQSIGTSLHWYQQKPDQSPKLLIKYASQSISGVPSRFSGSGSGTEFTLTINSLEAEDAAAYYCHQSSSLPFTFGGGTKVEIK

SEQ ID NO: 1062 - protein, 107 aa, synthetic construct; identical to SEQ ID NO: 1007
  REGION 1..107: note = Synthetic construct

SEQ ID NO: 1063 - protein, 20 aa, synthetic construct
  REGION 1..20: note = Synthetic construct
CHQSSSLPFTFGQGTKLEIK

SEQ ID NO: 1064 - protein, 107 aa, synthetic construct; identical to SEQ ID NO: 275
  REGION 1..107: note = Synthetic construct

SEQ ID NO: 1065 - protein, 107 aa, synthetic construct
  REGION 1..107: note = Synthetic construct
EIVSTQSPDFQSVTPKDKVTITCRASQSIGSSLHWYQQKPDQSPKLLIKSASQSFSGVPSRFSGSGSGTDFTLTINSLEPEDAATYYCHQSSSLPFTFGQGTKLEIK

SEQ ID NO: 1066 - protein, 107 aa, synthetic construct; identical to SEQ ID NO: 301
  REGION 1..107: note = Synthetic construct

SEQ ID NO: 1067 - protein, 107 aa, synthetic construct; identical to SEQ ID NO: 275
  REGION 1..107: note = Synthetic construct

SEQ ID NO: 1068 - protein, 107 aa, synthetic construct; identical to SEQ ID NO: 1020
  REGION 1..107: note = Synthetic construct

SEQ ID NO: 1069 - protein, 107 aa, synthetic construct; identical to SEQ ID NO: 1007
  REGION 1..107: note = Synthetic construct

SEQ ID NO: 1070 - protein, 107 aa, synthetic construct
  REGION 1..107: note = Synthetic construct
EIVLTRSPDFQSVTPKDKVTITCRASQSIGSSLHWYQQKPDQSPKLLIKSASQSFSGVPSRFSGSGSGTDFTLTINSLEPEDAATYYCHQSSSLPFTFGQGTKLEIK

SEQ ID NO: 1071 - protein, 107 aa, synthetic construct; identical to SEQ ID NO: 275
  REGION 1..107: note = Synthetic construct

SEQ ID NO: 1072 - protein, 107 aa, synthetic construct; identical to SEQ ID NO: 1022
  REGION 1..107: note = Synthetic construct

SEQ ID NO: 1073 - protein, 20 aa, synthetic construct
  REGION 1..20: note = Synthetic construct
CHQSSSLPFTFGQGTRLEIK

SEQ ID NO: 1074 - protein, 107 aa, synthetic construct; identical to SEQ ID NO: 299
  REGION 1..107: note = Synthetic construct

SEQ ID NO: 1075 - protein, 107 aa, synthetic construct; identical to SEQ ID NO: 1007
  REGION 1..107: note = Synthetic construct

SEQ ID NO: 1076 - protein, 107 aa, synthetic construct; identical to SEQ ID NO: 275
  REGION 1..107: note = Synthetic construct

SEQ ID NO: 1077 - protein, 107 aa, synthetic construct; identical to SEQ ID NO: 264
  REGION 1..107: note = Synthetic construct

SEQ ID NO: 1078 - protein, 107 aa, synthetic construct
  REGION 1..107: note = Synthetic construct
EIVLTQSPDFQSVTPKDKVTITCRASQSIGSSLHWYQQKPVQSPKLLIKSASQSFSGVPSRFSGSGSGTDFTLTINSLEPEDAATYYCHQSSSLPFTFGQGTKRESK

SEQ ID NO: 1079 - protein, 107 aa, synthetic construct; identical to SEQ ID NO: 1007
  REGION 1..107: note = Synthetic construct

SEQ ID NO: 1080 - protein, 107 aa, synthetic construct; identical to SEQ ID NO: 1007
  REGION 1..107: note = Synthetic construct

SEQ ID NO: 1081 - protein, 81 aa, synthetic construct; identical to SEQ ID NO: 307
  REGION 1..81: note = Synthetic construct

SEQ ID NO: 1082 - protein, 107 aa, synthetic construct; identical to SEQ ID NO: 265
  REGION 1..107: note = Synthetic construct

SEQ ID NO: 1083 - protein, 107 aa, synthetic construct; identical to SEQ ID NO: 1007
  REGION 1..107: note = Synthetic construct

SEQ ID NO: 1084 - protein, 107 aa, synthetic construct; identical to SEQ ID NO: 272
  REGION 1..107: note = Synthetic construct

SEQ ID NO: 1085 - protein, 107 aa, synthetic construct; identical to SEQ ID NO: 299
  REGION 1..107: note = Synthetic construct

SEQ ID NO: 1086 - protein, 107 aa, synthetic construct; identical to SEQ ID NO: 265
  REGION 1..107: note = Synthetic construct

SEQ ID NO: 1087 - protein, 107 aa, synthetic construct
  REGION 1..107: note = Synthetic construct
EIVLTQSPDFQSVTPKEKVTVTCRASQSIGSSLHWYQQKPDQSPKLLIKYASQSISGVPSRFSGSGSGTESTLTINNLEAEDAAAYYCHQSSSLPFTFGGGTKVEIK

SEQ ID NO: 1088 - protein, 107 aa, synthetic construct; identical to SEQ ID NO: 1007
  REGION 1..107: note = Synthetic construct

SEQ ID NO: 1089 - protein, 107 aa, synthetic construct; identical to SEQ ID NO: 990
  REGION 1..107: note = Synthetic construct

SEQ ID NO: 1090 - protein, 107 aa, synthetic construct; identical to SEQ ID NO: 1007
  REGION 1..107: note = Synthetic construct

SEQ ID NO: 1091 - protein, 107 aa, synthetic construct; identical to SEQ ID NO: 264
  REGION 1..107: note = Synthetic construct

SEQ ID NO: 1092 - protein, 107 aa, synthetic construct; identical to SEQ ID NO: 1007
  REGION 1..107: note = Synthetic construct

SEQ ID NO: 1093 - protein, 81 aa, synthetic construct
  REGION 1..81: note = Synthetic construct
QSIGSSLHWYQQKPDQSPKLLIRSASQSFSGVPSRFSGSGSGTDFTLTINSLEPEDAATYYCHQSSSLPFTFGQGTKLEIK

SEQ ID NO: 1094 - protein, 107 aa, synthetic construct
  REGION 1..107: note = Synthetic construct
EIVLTQSPDFQSVTPKDKVTITCRASQSIGSSLHWYQQKPDQSPKLLIESASQSFSGVPSRFSGSGSGTDFTLTINSLEPEDAATYYCHQSSSLPFTFGQGTKLEIK

SEQ ID NO: 1095 - protein, 55 aa, synthetic construct
  REGION 1..55: note = Synthetic construct
QSFSGVPSRFSGSGSGTDFTLTINSLEPEDAATYYCHQSSSLPFTFGQGTKLEIK

SEQ ID NO: 1096 - protein, 107 aa, synthetic construct; identical to SEQ ID NO: 1007
  REGION 1..107: note = Synthetic construct

SEQ ID NO: 1097 - protein, 107 aa, synthetic construct; identical to SEQ ID NO: 265
  REGION 1..107: note = Synthetic construct

SEQ ID NO: 1098 - protein, 107 aa, synthetic construct
  REGION 1..107: note = Synthetic construct
EIVLTQSQDFQSVTPKEKVTITCRASQSIGSSLHWYQQKPDQSPKLLIKYASQSFSGVPSRFSGSGSGTDFTLTINSLEAEDAATYYCHQSSSLPFTFGGGTKVEIK

SEQ ID NO: 1099 - protein, 107 aa, synthetic construct; identical to SEQ ID NO: 1007
  REGION 1..107: note = Synthetic construct

SEQ ID NO: 1100 - protein, 107 aa, synthetic construct; identical to SEQ ID NO: 314
  REGION 1..107: note = Synthetic construct

SEQ ID NO: 1101 - protein, 107 aa, synthetic construct; identical to SEQ ID NO: 1007
  REGION 1..107: note = Synthetic construct

SEQ ID NO: 1102 - protein, 81 aa, synthetic construct
  REGION 1..81: note = Synthetic construct
QSIGSSLHWYQQKPDQSPKLLIKSASQSFSGVPSRFSGSGSGTDFTLTINSLEPEDAATYYCHQSSSLPFTFGQGTKLEIK

SEQ ID NO: 1103 - protein, 107 aa, synthetic construct; identical to SEQ ID NO: 265
  REGION 1..107: note = Synthetic construct

SEQ ID NO: 1104 - protein, 107 aa, synthetic construct; identical to SEQ ID NO: 316
  REGION 1..107: note = Synthetic construct

SEQ ID NO: 1105 - protein, 107 aa, synthetic construct; identical to SEQ ID NO: 1007
  REGION 1..107: note = Synthetic construct

SEQ ID NO: 1106 - protein, 107 aa, synthetic construct; identical to SEQ ID NO: 1007
  REGION 1..107: note = Synthetic construct

SEQ ID NO: 1107 - protein, 107 aa, synthetic construct; identical to SEQ ID NO: 317
  REGION 1..107: note = Synthetic construct

SEQ ID NO: 1108 - protein, 107 aa, synthetic construct; identical to SEQ ID NO: 264
  REGION 1..107: note = Synthetic construct

SEQ ID NO: 1109 - protein, 107 aa, synthetic construct; identical to SEQ ID NO: 1007
  REGION 1..107: note = Synthetic construct

SEQ ID NO: 1110 - protein, 81 aa, synthetic construct; identical to SEQ ID NO: 1102
  REGION 1..81: note = Synthetic construct

SEQ ID NO: 1111 - protein, 107 aa, synthetic construct; identical to SEQ ID NO: 264
  REGION 1..107: note = Synthetic construct

SEQ ID NO: 1112 - protein, 20 aa, synthetic construct
  REGION 1..20: note = Synthetic construct
CHQSSSLPFTFGPGTKVDIK

SEQ ID NO: 1113 - protein, 107 aa, synthetic construct; identical to SEQ ID NO: 1007
  REGION 1..107: note = Synthetic construct

SEQ ID NO: 1114 - protein, 81 aa, synthetic construct; identical to SEQ ID NO: 1102
  REGION 1..81: note = Synthetic construct

SEQ ID NO: 1115 - protein, 106 aa, synthetic construct
  REGION 1..106: note = Synthetic construct
EIVLTQSPDFQSVTPKDKVTITCRASQSIGSSHWYQQKPDQSPKLLIKSASQSFSGVPSRFSGSGSGTDFTLTINSLEPEDAATYYCHQSSSLPFTFGQGTKLEIK

SEQ ID NO: 1116 - protein, 107 aa, synthetic construct; identical to SEQ ID NO: 265
  REGION 1..107: note = Synthetic construct

SEQ ID NO: 1117 - protein, 107 aa, synthetic construct; identical to SEQ ID NO: 1007
  REGION 1..107: note = Synthetic construct

SEQ ID NO: 1118 - protein, 107 aa, synthetic construct; identical to SEQ ID NO: 265
  REGION 1..107: note = Synthetic construct

SEQ ID NO: 1119 - protein, 107 aa, synthetic construct
  REGION 1..107: note = Synthetic construct
EVVLTQSPESQSVTPKETVTMTCRASQNIGRSLHWYQQKPGQSPKLLIRFASQSISGVPSRFSGSGSGTAFTLTISSLEAEDVATYYCHQSSSLPFTFGGGTKVEIK

SEQ ID NO: 1120 - protein, 107 aa, synthetic construct
  REGION 1..107: note = Synthetic construct
EIVLTQSPDLQSVTPKDKVTITCRASQSIGSSLHWYQQKPDQSPKLLIKSASQSFSGVPSRFSGSGSGTDFTLTINSLEPEDAATYYCHQSSSLPFTFGQGTKLEIK

SEQ ID NO: 1121 - protein, 107 aa, synthetic construct; identical to SEQ ID NO: 323
  REGION 1..107: note = Synthetic construct

SEQ ID NO: 1122 - protein, 107 aa, synthetic construct; identical to SEQ ID NO: 1007
  REGION 1..107: note = Synthetic construct

SEQ ID NO: 1123 - protein, 107 aa, synthetic construct; identical to SEQ ID NO: 324
  REGION 1..107: note = Synthetic construct

SEQ ID NO: 1124 - protein, 81 aa, synthetic construct; identical to SEQ ID NO: 1102
  REGION 1..81: note = Synthetic construct

SEQ ID NO: 1125 - protein, 107 aa, synthetic construct; identical to SEQ ID NO: 265
  REGION 1..107: note = Synthetic construct

SEQ ID NO: 1126 - protein, 107 aa, synthetic construct; identical to SEQ ID NO: 326
  REGION 1..107: note = Synthetic construct

SEQ ID NO: 1127 - protein, 81 aa, synthetic construct; identical to SEQ ID NO: 293
  REGION 1..81: note = Synthetic construct

SEQ ID NO: 1128 - protein, 107 aa, synthetic construct; identical to SEQ ID NO: 1007
  REGION 1..107: note = Synthetic construct

SEQ ID NO: 1129 - protein, 113 aa, synthetic construct
  REGION 1..113: note = Synthetic construct
DIVMTQSPDSLAVSLGERATINCKSSQSVLYSSNNKNSLAWYQQKPGQPPKLLIYWASTRESGVPDRFSGSGSGTDFTLTINSLEAEDAATYYCHQSSSLPFTFGPGTKVDIK

SEQ ID NO: 1130 - protein, 107 aa, synthetic construct; identical to SEQ ID NO: 1007
  REGION 1..107: note = Synthetic construct

SEQ ID NO: 1131 - protein, 107 aa, synthetic construct; identical to SEQ ID NO: 275
  REGION 1..107: note = Synthetic construct

SEQ ID NO: 1132 - protein, 107 aa, synthetic construct; identical to SEQ ID NO: 1050
  REGION 1..107: note = Synthetic construct

SEQ ID NO: 1133 - protein, 58 aa, synthetic construct; identical to SEQ ID NO: 329
  REGION 1..58: note = Synthetic construct

SEQ ID NO: 1134 - protein, 107 aa, synthetic construct; identical to SEQ ID NO: 330
  REGION 1..107: note = Synthetic construct

SEQ ID NO: 1135 - protein, 107 aa, synthetic construct; identical to SEQ ID NO: 331
  REGION 1..107: note = Synthetic construct

SEQ ID NO: 1136 - protein, 107 aa, synthetic construct; identical to SEQ ID NO: 265
  REGION 1..107: note = Synthetic construct

SEQ ID NO: 1137 - protein, 107 aa, synthetic construct; identical to SEQ ID NO: 264
  REGION 1..107: note = Synthetic construct

SEQ ID NO: 1138 - protein, 107 aa, synthetic construct; identical to SEQ ID NO: 334
  REGION 1..107: note = Synthetic construct

SEQ ID NO: 1139 - protein, 20 aa, synthetic construct
  REGION 1..20: note = Synthetic construct
CHQSSSLPFTFGPGTKVDIK

SEQ ID NO: 1140 - protein, 107 aa, synthetic construct; identical to SEQ ID NO: 336
  REGION 1..107: note = Synthetic construct

SEQ ID NO: 1141 - protein, 107 aa, synthetic construct
  REGION 1..107: note = Synthetic construct
EVVLTQSPESQSVTPKETVTMTCRASQNIGRSLHWYQQKPGQSPKLLIRFASHSISGVPSRFSGSGSGTAFTLTISSLEAEDVATYYCHQSSSLPFTFGGGTKVEIK

SEQ ID NO: 1142 - protein, 81 aa, synthetic construct
  REGION 1..81: note = Synthetic construct
QSIGSSLHWYQQKPDQSPKLLIKSASQSFSGVPSRFGGSGSGTDFTLTINSLEPEDAATYYCHQSSSLPFTFGQGTKLEIK

SEQ ID NO: 1143 - protein, 107 aa, synthetic construct
  REGION 1..107: note = Synthetic construct
EIVLTQSPDFQSVTPKDKVTITCRASQSIGSSLHWYQQKPDQSPKLLIKSASQSFSGVPSRFSGSGSGTDFTLTINSLEPEDAATYYCHQSSSLPFTFGLGTKLEIK

SEQ ID NO: 1144 - protein, 107 aa, synthetic construct
  REGION 1..107: note = Synthetic construct
EIVLTQPPDFQSVTPKDKVTITCRASQSIGSSLHWYQQKPDQSPKLLIKSASQSFSGVPSRFSGSGSGTDFTLTINSLEPEDAATYYCHQSSSLPFTFGQGTKLEIK

SEQ ID NO: 1145 - protein, 107 aa, synthetic construct; identical to SEQ ID NO: 265
  REGION 1..107: note = Synthetic construct

SEQ ID NO: 1146 - protein, 107 aa, synthetic construct; identical to SEQ ID NO: 264
  REGION 1..107: note = Synthetic construct

SEQ ID NO: 1147 - protein, 107 aa, synthetic construct
  REGION 1..107: note = Synthetic construct
EIVLTQSPDFQSVTPKDKVTTTCRASQSIGSSLHWYQQKPDQSPKLLIKSASQSFSGVPSRFSGSGSGTDFTLTINSLEPEDAATYYCHQSSSLPFTFGQGTKLEIK

SEQ ID NO: 1148 - protein, 107 aa, synthetic construct; identical to SEQ ID NO: 264
  REGION 1..107: note = Synthetic construct

SEQ ID NO: 1149 - protein, 107 aa, synthetic construct; identical to SEQ ID NO: 1007
  REGION 1..107: note = Synthetic construct

SEQ ID NO: 1150 - protein, 78 aa, synthetic construct; identical to SEQ ID NO: 266
  REGION 1..78: note = Synthetic construct

SEQ ID NO: 1151 - protein, 107 aa, synthetic construct; identical to SEQ ID NO: 341
  REGION 1..107: note = Synthetic construct

SEQ ID NO: 1152 - protein, 106 aa, synthetic construct
  REGION 1..106: note = Synthetic construct
EIVLTQSPDFQSVTPKEKVTITCRASQSIGTSLHWYQQKPDQSPKLLIKYASQSFSGVPSRFSGSGSGADFTLTINSLEAEDAATYFCHQSSSLPFTFGGGTRVEI

SEQ ID NO: 1153 - protein, 107 aa, synthetic construct; identical to SEQ ID NO: 342
  REGION 1..107: note = Synthetic construct

SEQ ID NO: 1154 - protein, 107 aa, synthetic construct
  REGION 1..107: note = Synthetic construct
EIVLTQSPDFQSVTSKDKVTITCRASQSIGSSLHWYQQKPDQSPKLLIKSASQSFSRVPSRFSGSGSETDFTLTINSLEPEDAATYYCHQSSSLPFTFGQGTKLEIK

SEQ ID NO: 1155 - protein, 107 aa, synthetic construct; identical to SEQ ID NO: 1061
  REGION 1..107: note = Synthetic construct

SEQ ID NO: 1156 - protein, 107 aa, synthetic construct; identical to SEQ ID NO: 343
  REGION 1..107: note = Synthetic construct

SEQ ID NO: 1157 - protein, 107 aa, synthetic construct; identical to SEQ ID NO: 990
  REGION 1..107: note = Synthetic construct

SEQ ID NO: 1158 - protein, 107 aa, synthetic construct; identical to SEQ ID NO: 264
  REGION 1..107: note = Synthetic construct

SEQ ID NO: 1159 - protein, 81 aa, synthetic construct; identical to SEQ ID NO: 345
  REGION 1..81: note = Synthetic construct

SEQ ID NO: 1160 - protein, 107 aa, synthetic construct
  REGION 1..107: note = Synthetic construct
EIVLTQSPDFQSVTPKEKVTITCRASQSIGSSLHWYQQKPDQSPKLLIKYASQSFSGVPSRFSGSGSGTDFTLTINSLEAEDAATYYCHQSSSLPYPFGQGTKLEIK

SEQ ID NO: 1161 - protein, 107 aa, synthetic construct
  REGION 1..107: note = Synthetic construct
EIVLTQSPDFQSVTPKEKVTITCRASQSIGSSLHWYQQKPDQSPKLLIKYASQSISGVPSRFSGSGSGTDFTLTINSLEAEDAATYYCHQSSSLPQAFGQGTKVEIK

SEQ ID NO: 1162 - protein, 58 aa, synthetic construct
  REGION 1..58: note = Synthetic construct
YASQSMSGVPSRFSGSGSGTDFTLTINSLEAEDAATYYCHQSSSLPQAFGQGTKVEIK

SEQ ID NO: 1163 - protein, 107 aa, synthetic construct
  REGION 1..107: note = Synthetic construct
EIVLTQSPDFQSVTPKEKVTITCRASQSIGSSLHWYQQKPDQPPKLLIKYASQSISGVPSRFSGSGSGTDFTLTINSLEAEDAAAYYCHQSSSLPQAFGQGTKVEIK

SEQ ID NO: 1164 - protein, 75 aa, synthetic construct
  REGION 1..75: note = Synthetic construct
LHWYQHKPDQSPRLLIKYASQSMSGVPSRFSGSGSGTDFTLTINSLEAEDAATYYCHQSSSLPQAFGQGTKVEIK

SEQ ID NO: 1165 - protein, 107 aa, synthetic construct
  REGION 1..107: note = Synthetic construct
EIVLTQSPDFQSVTPKEKVTITCRASQSIGSSLHWYQQKPDQSPKLLIKYASQSFSGVPSRFSGSGSGTDFTLTINSLEAEVAATYYCHQSSSLPQAFGQGTKVEIK

SEQ ID NO: 1166 - protein, 107 aa, synthetic construct; identical to SEQ ID NO: 258
  REGION 1..107: note = Synthetic construct

SEQ ID NO: 1167 - protein, 107 aa, synthetic construct
  REGION 1..107: note = Synthetic construct
EIVLTQSPDFQSVTPKEKVTITCRASQSVGSDLHWYQQKADQSPKLLIKHASQSFTGVPSRFSGSGSGTEFTLTINGLEAEDAATYYCHQSASLPQAFGQGTKLEIK

SEQ ID NO: 1168 - protein, 107 aa, synthetic construct
  REGION 1..107: note = Synthetic construct
EIVLTQSPDFQSVTPKEKVTITCRASQNIGTSLHWYQQKPGQSPRLLIKSASQSFSGVPSKFSGSGYGTDFTLTINGLEPEDAATYYCHQSSSLPYSFGPGTKLEIK

SEQ ID NO: 1169 - protein, 104 aa, synthetic construct
  REGION 1..104: note = Synthetic construct
EVVLTQSPGFQSVTPKEAVTITCRASLSIGNNLHWYQQKPGQSPSLLIKSASQPMSGVPSRFSGSGSGTDFTLTINSLEVEDAATYYCHQSKSLPLAFGGGTKV

SEQ ID NO: 1170 - protein, 108 aa, synthetic construct; identical to SEQ ID NO: 351
  REGION 1..108: note = Synthetic construct

SEQ ID NO: 1171 - protein, 113 aa, synthetic construct; identical to SEQ ID NO: 574
  REGION 1..113: note = Synthetic construct

SEQ ID NO: 1172 - protein, 113 aa, synthetic construct; identical to SEQ ID NO: 575
  REGION 1..113: note = Synthetic construct

SEQ ID NO: 1173 - protein, 113 aa, synthetic construct; identical to SEQ ID NO: 433
  REGION 1..113: note = Synthetic construct

SEQ ID NO: 1174 - protein, 112 aa, synthetic construct; identical to SEQ ID NO: 434
  REGION 1..112: note = Synthetic construct

SEQ ID NO: 1175 - protein, 113 aa, synthetic construct; identical to SEQ ID NO: 435
  REGION 1..113: note = Synthetic construct

SEQ ID NO: 1176 - protein, 113 aa, synthetic construct; identical to SEQ ID NO: 436
  REGION 1..113: note = Synthetic construct

SEQ ID NO: 1177 - protein, 113 aa, synthetic construct; identical to SEQ ID NO: 437
  REGION 1..113: note = Synthetic construct

SEQ ID NO: 1178 - protein, 113 aa, synthetic construct; identical to SEQ ID NO: 438
  REGION 1..113: note = Synthetic construct

SEQ ID NO: 1179 - protein, 108 aa, synthetic construct; identical to SEQ ID NO: 439
  REGION 1..108: note = Synthetic construct

SEQ ID NO: 1180 - protein, 113 aa, synthetic construct; identical to SEQ ID NO: 438
  REGION 1..113: note = Synthetic construct

SEQ ID NO: 1181 - protein, 113 aa, synthetic construct; identical to SEQ ID NO: 441
  REGION 1..113: note = Synthetic construct

SEQ ID NO: 1182 - protein, 113 aa, synthetic construct; identical to SEQ ID NO: 438
  REGION 1..113: note = Synthetic construct

SEQ ID NO: 1183 - protein, 113 aa, synthetic construct; identical to SEQ ID NO: 438
  REGION 1..113: note = Synthetic construct

SEQ ID NO: 1184 - protein, 113 aa, synthetic construct; identical to SEQ ID NO: 438
  REGION 1..113: note = Synthetic construct

SEQ ID NO: 1185 - protein, 113 aa, synthetic construct; identical to SEQ ID NO: 438
  REGION 1..113: note = Synthetic construct

SEQ ID NO: 1186 - protein, 113 aa, synthetic construct; identical to SEQ ID NO: 438
  REGION 1..113: note = Synthetic construct

SEQ ID NO: 1187 - protein, 108 aa, synthetic construct; identical to SEQ ID NO: 447
  REGION 1..108: note = Synthetic construct

SEQ ID NO: 1188 - protein, 108 aa, synthetic construct; identical to SEQ ID NO: 448
  REGION 1..108: note = Synthetic construct

SEQ ID NO: 1189 - protein, 87 aa, synthetic construct; identical to SEQ ID NO: 449
  REGION 1..87: note = Synthetic construct

SEQ ID NO: 1190 - protein, 113 aa, synthetic construct; identical to SEQ ID NO: 438
  REGION 1..113: note = Synthetic construct

SEQ ID NO: 1191 - protein, 113 aa, synthetic construct; identical to SEQ ID NO: 438
  REGION 1..113: note = Synthetic construct

SEQ ID NO: 1192 - protein, 58 aa, synthetic construct
  REGION 1..58: note = Synthetic construct
AASSLHSGVPSRFSGSGSGTDFTFTISSLQAEDVAVYYCQHFYSNPPTFGPGTTVAIK

SEQ ID NO: 1193 - protein, 113 aa, synthetic construct; identical to SEQ ID NO: 435
  REGION 1..113: note = Synthetic construct

SEQ ID NO: 1194 - protein, 113 aa, synthetic construct; identical to SEQ ID NO: 453
  REGION 1..113: note = Synthetic construct

SEQ ID NO: 1195 - protein, 108 aa, synthetic construct; identical to SEQ ID NO: 447
  REGION 1..108: note = Synthetic construct

SEQ ID NO: 1196 - protein, 113 aa, synthetic construct; identical to SEQ ID NO: 438
  REGION 1..113: note = Synthetic construct

SEQ ID NO: 1197 - protein, 113 aa, synthetic construct; identical to SEQ ID NO: 438
  REGION 1..113: note = Synthetic construct

SEQ ID NO: 1198 - protein, 113 aa, synthetic construct; identical to SEQ ID NO: 438
  REGION 1..113: note = Synthetic construct

SEQ ID NO: 1199 - protein, 113 aa, synthetic construct; identical to SEQ ID NO: 438
  REGION 1..113: note = Synthetic construct

SEQ ID NO: 1200 - protein, 113 aa, synthetic construct; identical to SEQ ID NO: 438
  REGION 1..113: note = Synthetic construct

SEQ ID NO: 1201 - protein, 75 aa, synthetic construct; identical to SEQ ID NO: 460
  REGION 1..75: note = Synthetic construct

SEQ ID NO: 1202 - protein, 113 aa, synthetic construct; identical to SEQ ID NO: 461
  REGION 1..113: note = Synthetic construct

SEQ ID NO: 1203 - protein, 113 aa, synthetic construct; identical to SEQ ID NO: 438
  REGION 1..113: note = Synthetic construct

SEQ ID NO: 1204 - protein, 113 aa, synthetic construct; identical to SEQ ID NO: 463
  REGION 1..113: note = Synthetic construct

SEQ ID NO: 1205 - protein, 113 aa, synthetic construct; identical to SEQ ID NO: 438
  REGION 1..113: note = Synthetic construct

SEQ ID NO: 1206 - protein, 113 aa, synthetic construct; identical to SEQ ID NO: 465
  REGION 1..113: note = Synthetic construct

SEQ ID NO: 1207 - protein, 113 aa, synthetic construct; identical to SEQ ID NO: 466
  REGION 1..113: note = Synthetic construct

SEQ ID NO: 1208 - protein, 113 aa, synthetic construct; identical to SEQ ID NO: 467
  REGION 1..113: note = Synthetic construct

SEQ ID NO: 1209 - protein, 113 aa, synthetic construct; identical to SEQ ID NO: 438
  REGION 1..113: note = Synthetic construct

SEQ ID NO: 1210 - protein, 113 aa, synthetic construct; identical to SEQ ID NO: 469
  REGION 1..113: note = Synthetic construct

SEQ ID NO: 1211 - protein, 113 aa, synthetic construct; identical to SEQ ID NO: 438
  REGION 1..113: note = Synthetic construct

SEQ ID NO: 1212 - protein, 113 aa, synthetic construct; identical to SEQ ID NO: 471
  REGION 1..113: note = Synthetic construct

SEQ ID NO: 1213 - protein, 108 aa, synthetic construct; identical to SEQ ID NO: 447
  REGION 1..108: note = Synthetic construct

SEQ ID NO: 1214 - protein, 113 aa, synthetic construct; identical to SEQ ID NO: 438
  REGION 1..113: note = Synthetic construct

SEQ ID NO: 1215 - protein, 113 aa, synthetic construct; identical to SEQ ID NO: 438
  REGION 1..113: note = Synthetic construct

SEQ ID NO: 1216 - protein, 113 aa, synthetic construct; identical to SEQ ID NO: 438
  REGION 1..113: note = Synthetic construct

SEQ ID NO: 1217 - protein, 58 aa, synthetic construct; identical to SEQ ID NO: 476
  REGION 1..58: note = Synthetic construct

SEQ ID NO: 1218 - protein, 113 aa, synthetic construct; identical to SEQ ID NO: 438
  REGION 1..113: note = Synthetic construct

SEQ ID NO: 1219 - protein, 53 aa, synthetic construct; identical to SEQ ID NO: 478
  REGION 1..53: note = Synthetic construct

SEQ ID NO: 1220 - protein, 113 aa, synthetic construct; identical to SEQ ID NO: 479
  REGION 1..113: note = Synthetic construct

SEQ ID NO: 1221 - protein, 113 aa, synthetic construct; identical to SEQ ID NO: 438
  REGION 1..113: note = Synthetic construct

SEQ ID NO: 1222 - protein, 108 aa, synthetic construct; identical to SEQ ID NO: 481
  REGION 1..108: note = Synthetic construct

SEQ ID NO: 1223 - protein, 113 aa, synthetic construct; identical to SEQ ID NO: 482
  REGION 1..113: note = Synthetic construct

SEQ ID NO: 1224 - protein, 113 aa, synthetic construct; identical to SEQ ID NO: 438
  REGION 1..113: note = Synthetic construct

SEQ ID NO: 1225 - protein, 113 aa, synthetic construct; identical to SEQ ID NO: 484
  REGION 1..113: note = Synthetic construct

SEQ ID NO: 1226 - protein, 113 aa, synthetic construct; identical to SEQ ID NO: 485
  REGION 1..113: note = Synthetic construct

SEQ ID NO: 1227 - protein, 113 aa, synthetic construct; identical to SEQ ID NO: 486
  REGION 1..113: note = Synthetic construct

SEQ ID NO: 1228 - protein, 58 aa, synthetic construct; identical to SEQ ID NO: 476
  REGION 1..58: note = Synthetic construct

SEQ ID NO: 1229 - protein, 113 aa, synthetic construct; identical to SEQ ID NO: 438
  REGION 1..113: note = Synthetic construct

SEQ ID NO: 1230 - protein, 113 aa, synthetic construct; identical to SEQ ID NO: 438
  REGION 1..113: note = Synthetic construct

SEQ ID NO: 1231 - protein, 113 aa, synthetic construct; identical to SEQ ID NO: 490
  REGION 1..113: note = Synthetic construct

SEQ ID NO: 1232 - protein, 113 aa, synthetic construct; identical to SEQ ID NO: 491
  REGION 1..113: note = Synthetic construct

SEQ ID NO: 1233 - protein, 113 aa, synthetic construct; identical to SEQ ID NO: 492
  REGION 1..113: note = Synthetic construct

SEQ ID NO: 1234 - protein, 113 aa, synthetic construct; identical to SEQ ID NO: 438
  REGION 1..113: note = Synthetic construct

SEQ ID NO: 1235 - protein, 113 aa, synthetic construct; identical to SEQ ID NO: 494
  REGION 1..113: note = Synthetic construct

SEQ ID NO: 1236 - protein, 113 aa, synthetic construct; identical to SEQ ID NO: 438
  REGION 1..113: note = Synthetic construct

SEQ ID NO: 1237 - protein, 113 aa, synthetic construct; identical to SEQ ID NO: 438
  REGION 1..113: note = Synthetic construct

SEQ ID NO: 1238 - protein, 113 aa, synthetic construct; identical to SEQ ID NO: 497
  REGION 1..113: note = Synthetic construct

SEQ ID NO: 1239 - protein, 113 aa, synthetic construct; identical to SEQ ID NO: 438
  REGION 1..113: note = Synthetic construct

SEQ ID NO: 1240 - protein, 113 aa, synthetic construct; identical to SEQ ID NO: 499
  REGION 1..113: note = Synthetic construct

SEQ ID NO: 1241 - protein, 113 aa, synthetic construct; identical to SEQ ID NO: 500
  REGION 1..113: note = Synthetic construct

SEQ ID NO: 1242 - protein, 113 aa, synthetic construct; identical to SEQ ID NO: 438
  REGION 1..113: note = Synthetic construct

SEQ ID NO: 1243 - protein, 108 aa, synthetic construct; identical to SEQ ID NO: 447
  REGION 1..108: note = Synthetic construct

SEQ ID NO: 1244 - protein, 108 aa, synthetic construct; identical to SEQ ID NO: 447
  REGION 1..108: note = Synthetic construct

SEQ ID NO: 1245 - protein, 113 aa, synthetic construct; identical to SEQ ID NO: 438
  REGION 1..113: note = Synthetic construct

SEQ ID NO: 1246 - protein, 113 aa, synthetic construct; identical to SEQ ID NO: 438
  REGION 1..113: note = Synthetic construct

SEQ ID NO: 1247 - protein, 113 aa, synthetic construct; identical to SEQ ID NO: 438
  REGION 1..113: note = Synthetic construct

SEQ ID NO: 1248 - protein, 113 aa, synthetic construct; identical to SEQ ID NO: 507
  REGION 1..113: note = Synthetic construct

SEQ ID NO: 1249 - protein, 108 aa, synthetic construct; identical to SEQ ID NO: 447
  REGION 1..108: note = Synthetic construct

SEQ ID NO: 1250 - protein, 108 aa, synthetic construct; identical to SEQ ID NO: 447
  REGION 1..108: note = Synthetic construct

SEQ ID NO: 1251 - protein, 113 aa, synthetic construct; identical to SEQ ID NO: 510
  REGION 1..113: note = Synthetic construct

SEQ ID NO: 1252 - protein, 113 aa, synthetic construct; identical to SEQ ID NO: 511
  REGION 1..113: note = Synthetic construct

SEQ ID NO: 1253 - protein, 113 aa, synthetic construct; identical to SEQ ID NO: 512
  REGION 1..113: note = Synthetic construct

SEQ ID NO: 1254 - protein, 113 aa, synthetic construct; identical to SEQ ID NO: 438
  REGION 1..113: note = Synthetic construct

SEQ ID NO: 1255 - protein, 113 aa, synthetic construct; identical to SEQ ID NO: 438
  REGION 1..113: note = Synthetic construct

SEQ ID NO: 1256 - protein, 113 aa, synthetic construct; identical to SEQ ID NO: 438
  REGION 1..113: note = Synthetic construct

SEQ ID NO: 1257 - protein, 113 aa, synthetic construct; identical to SEQ ID NO: 438
  REGION 1..113: note = Synthetic construct

SEQ ID NO: 1258 - protein, 113 aa, synthetic construct; identical to SEQ ID NO: 438
  REGION 1..113: note = Synthetic construct

SEQ ID NO: 1259 - protein, 113 aa, synthetic construct; identical to SEQ ID NO: 438
  REGION 1..113: note = Synthetic construct

SEQ ID NO: 1260 - protein, 113 aa, synthetic construct; identical to SEQ ID NO: 438
  REGION 1..113: note = Synthetic construct

SEQ ID NO: 1261 - protein, 113 aa, synthetic construct; identical to SEQ ID NO: 520
  REGION 1..113: note = Synthetic construct

SEQ ID NO: 1262 - protein, 113 aa, synthetic construct; identical to SEQ ID NO: 438
  REGION 1..113: note = Synthetic construct

SEQ ID NO: 1263 - protein, 113 aa, synthetic construct; identical to SEQ ID NO: 438
  REGION 1..113: note = Synthetic construct

SEQ ID NO: 1264 - protein, 113 aa, synthetic construct; identical to SEQ ID NO: 438
  REGION 1..113: note = Synthetic construct

SEQ ID NO: 1265 - protein, 113 aa, synthetic construct; identical to SEQ ID NO: 524
  REGION 1..113: note = Synthetic construct

SEQ ID NO: 1266 - protein, 113 aa, synthetic construct; identical to SEQ ID NO: 438
  REGION 1..113: note = Synthetic construct

SEQ ID NO: 1267 - protein, 113 aa, synthetic construct; identical to SEQ ID NO: 438
  REGION 1..113: note = Synthetic construct

SEQ ID NO: 1268 - protein, 113 aa, synthetic construct; identical to SEQ ID NO: 438
  REGION 1..113: note = Synthetic construct

SEQ ID NO: 1269 - protein, 113 aa, synthetic construct; identical to SEQ ID NO: 438
  REGION 1..113: note = Synthetic construct

SEQ ID NO: 1270 - protein, 113 aa, synthetic construct; identical to SEQ ID NO: 438
  REGION 1..113: note = Synthetic construct

SEQ ID NO: 1271 - protein, 113 aa, synthetic construct; identical to SEQ ID NO: 438
  REGION 1..113: note = Synthetic construct

SEQ ID NO: 1272 - protein, 113 aa, synthetic construct; identical to SEQ ID NO: 438
  REGION 1..113: note = Synthetic construct

SEQ ID NO: 1273 - protein, 113 aa, synthetic construct; identical to SEQ ID NO: 532
  REGION 1..113: note = Synthetic construct

SEQ ID NO: 1274 - protein, 113 aa, synthetic construct; identical to SEQ ID NO: 438
  REGION 1..113: note = Synthetic construct

SEQ ID NO: 1275 - protein, 113 aa, synthetic construct; identical to SEQ ID NO: 534
  REGION 1..113: note = Synthetic construct

SEQ ID NO: 1276 - protein, 113 aa, synthetic construct; identical to SEQ ID NO: 438
  REGION 1..113: note = Synthetic construct

SEQ ID NO: 1277 - protein, 113 aa, synthetic construct; identical to SEQ ID NO: 438
  REGION 1..113: note = Synthetic construct

SEQ ID NO: 1278 - protein, 113 aa, synthetic construct; identical to SEQ ID NO: 438
  REGION 1..113: note = Synthetic construct

SEQ ID NO: 1279 - protein, 113 aa, synthetic construct; identical to SEQ ID NO: 438
  REGION 1..113: note = Synthetic construct

SEQ ID NO: 1280 - protein, 113 aa, synthetic construct; identical to SEQ ID NO: 438
  REGION 1..113: note = Synthetic construct

SEQ ID NO: 1281 - protein, 113 aa, synthetic construct; identical to SEQ ID NO: 438
  REGION 1..113: note = Synthetic construct

SEQ ID NO: 1282 - protein, 113 aa, synthetic construct; identical to SEQ ID NO: 438
  REGION 1..113: note = Synthetic construct

SEQ ID NO: 1283 - protein, 113 aa, synthetic construct; identical to SEQ ID NO: 438
  REGION 1..113: note = Synthetic construct

SEQ ID NO: 1284 - protein, 113 aa, synthetic construct; identical to SEQ ID NO: 438
  REGION 1..113: note = Synthetic construct

SEQ ID NO: 1285 - protein, 113 aa, synthetic construct; identical to SEQ ID NO: 471
  REGION 1..113: note = Synthetic construct

SEQ ID NO: 1286 - protein, 113 aa, synthetic construct; identical to SEQ ID NO: 438
  REGION 1..113: note = Synthetic construct

SEQ ID NO: 1287 - protein, 113 aa, synthetic construct; identical to SEQ ID NO: 546
  REGION 1..113: note = Synthetic construct

SEQ ID NO: 1288 - protein, 113 aa, synthetic construct; identical to SEQ ID NO: 547
  REGION 1..113: note = Synthetic construct

SEQ ID NO: 1289 - protein, 113 aa, synthetic construct; identical to SEQ ID NO: 548
  REGION 1..113: note = Synthetic construct

SEQ ID NO: 1290 - protein, 113 aa, synthetic construct; identical to SEQ ID NO: 438
  REGION 1..113: note = Synthetic construct

SEQ ID NO: 1291 - protein, 113 aa, synthetic construct; identical to SEQ ID NO: 550
  REGION 1..113: note = Synthetic construct

SEQ ID NO: 1292 - protein, 113 aa, synthetic construct; identical to SEQ ID NO: 551
  REGION 1..113: note = Synthetic construct

SEQ ID NO: 1293 - protein, 113 aa, synthetic construct; identical to SEQ ID NO: 552
  REGION 1..113: note = Synthetic construct

SEQ ID NO: 1294 - protein, 113 aa, synthetic construct; identical to SEQ ID NO: 438
  REGION 1..113: note = Synthetic construct

SEQ ID NO: 1295 - protein, 113 aa, synthetic construct; identical to SEQ ID NO: 554
  REGION 1..113: note = Synthetic construct

SEQ ID NO: 1296 - protein, 113 aa, synthetic construct; identical to SEQ ID NO: 438
  REGION 1..113: note = Synthetic construct

SEQ ID NO: 1297 - protein, 113 aa, synthetic construct; identical to SEQ ID NO: 556
  REGION 1..113: note = Synthetic construct

SEQ ID NO: 1298 - protein, 113 aa, synthetic construct; identical to SEQ ID NO: 558
  REGION 1..113: note = Synthetic construct

SEQ ID NO: 1299 - protein, 113 aa, synthetic construct; identical to SEQ ID NO: 352
  REGION 1..113: note = Synthetic construct

SEQ ID NO: 1300 - protein, 113 aa, synthetic construct; identical to SEQ ID NO: 353
  REGION 1..113: note = Synthetic construct

SEQ ID NO: 1301 - protein, 113 aa, synthetic construct; identical to SEQ ID NO: 352
  REGION 1..113: note = Synthetic construct

SEQ ID NO: 1302 - protein, 113 aa, synthetic construct; identical to SEQ ID NO: 352
  REGION 1..113: note = Synthetic construct

SEQ ID NO: 1303 - protein, 113 aa, synthetic construct; identical to SEQ ID NO: 352
  REGION 1..113: note = Synthetic construct

SEQ ID NO: 1304 - protein, 113 aa, synthetic construct; identical to SEQ ID NO: 352
  REGION 1..113: note = Synthetic construct

SEQ ID NO: 1305 - protein, 113 aa, synthetic construct; identical to SEQ ID NO: 352
  REGION 1..113: note = Synthetic construct

SEQ ID NO: 1306 - protein, 113 aa, synthetic construct; identical to SEQ ID NO: 352
  REGION 1..113: note = Synthetic construct

SEQ ID NO: 1307 - protein, 113 aa, synthetic construct; identical to SEQ ID NO: 360
  REGION 1..113: note = Synthetic construct

SEQ ID NO: 1308 - protein, 108 aa, synthetic construct
  REGION 1..108: note = Synthetic construct
EIVLTQSPGTLSLSPGERATLSCRASQSVSTTFLAWYQQKPGQAPRLLIYGTSSRATGIPDRFSGSGSGTDFTLTISSLQAEDVAVYYCQHFYSSPPTFGPGTTVAIK

SEQ ID NO: 1309 - protein, 107 aa, synthetic construct
  REGION 1..107: note = Synthetic construct
DIQMTQSPSSMSASVGDRVTITCRASQGISSWLAWYQQRPGRAPKLLIYDASRLQSGVPSRFSGSGSGTDFTLTISSLQAEDVAVYYCQHFYSSPPTFGPGTTVAIK

SEQ ID NO: 1310 - protein, 113 aa, synthetic construct; identical to SEQ ID NO: 352
  REGION 1..113: note = Synthetic construct

SEQ ID NO: 1311 - protein, 58 aa, synthetic construct; identical to SEQ ID NO: 362
  REGION 1..58: note = Synthetic construct

SEQ ID NO: 1312 - protein, 107 aa, synthetic construct
  REGION 1..107: note = Synthetic construct
EIMMTQSPATLSVSPGERVILSCRASQSVSSNLAWYQQKPGQAPRLLIYGASTRATGIPARFSGSGSGTDFTLTISSLQAEDVAVYYCQHFYSSPPTFGPGTTVAIK

SEQ ID NO: 1313 - protein, 113 aa, synthetic construct; identical to SEQ ID NO: 352
  REGION 1..113: note = Synthetic construct

SEQ ID NO: 1314 - protein, 113 aa, synthetic construct; identical to SEQ ID NO: 352
  REGION 1..113: note = Synthetic construct

SEQ ID NO: 1315 - protein, 113 aa, synthetic construct; identical to SEQ ID NO: 352
  REGION 1..113: note = Synthetic construct

SEQ ID NO: 1316 - protein, 113 aa, synthetic construct; identical to SEQ ID NO: 352
  REGION 1..113: note = Synthetic construct

SEQ ID NO: 1317 - protein, 113 aa, synthetic construct; identical to SEQ ID NO: 367
  REGION 1..113: note = Synthetic construct

SEQ ID NO: 1318 - protein, 113 aa, synthetic construct; identical to SEQ ID NO: 352
  REGION 1..113: note = Synthetic construct

SEQ ID NO: 1319 - protein, 58 aa, synthetic construct; identical to SEQ ID NO: 369
  REGION 1..58: note = Synthetic construct

SEQ ID NO: 1320 - protein, 58 aa, synthetic construct; identical to SEQ ID NO: 370
  REGION 1..58: note = Synthetic construct

SEQ ID NO: 1321 - protein, 113 aa, synthetic construct; identical to SEQ ID NO: 371
  REGION 1..113: note = Synthetic construct

SEQ ID NO: 1322 - protein, 113 aa, synthetic construct; identical to SEQ ID NO: 352
  REGION 1..113: note = Synthetic construct

SEQ ID NO: 1323 - protein, 113 aa, synthetic construct; identical to SEQ ID NO: 373
  REGION 1..113: note = Synthetic construct

SEQ ID NO: 1324 - protein, 113 aa, synthetic construct; identical to SEQ ID NO: 352
  REGION 1..113: note = Synthetic construct

SEQ ID NO: 1325 - protein, 113 aa, synthetic construct; identical to SEQ ID NO: 375
  REGION 1..113: note = Synthetic construct

SEQ ID NO: 1326 - protein, 113 aa, synthetic construct; identical to SEQ ID NO: 352
  REGION 1..113: note = Synthetic construct

SEQ ID NO: 1327 - protein, 113 aa, synthetic construct; identical to SEQ ID NO: 352
  REGION 1..113: note = Synthetic construct

SEQ ID NO: 1328 - protein, 113 aa, synthetic construct; identical to SEQ ID NO: 378
  REGION 1..113: note = Synthetic construct

SEQ ID NO: 1329 - protein, 113 aa, synthetic construct; identical to SEQ ID NO: 352
  REGION 1..113: note = Synthetic construct

SEQ ID NO: 1330 - protein, 113 aa, synthetic construct; identical to SEQ ID NO: 352
  REGION 1..113: note = Synthetic construct

SEQ ID NO: 1331 - protein, 113 aa, synthetic construct; identical to SEQ ID NO: 381
  REGION 1..113: note = Synthetic construct

SEQ ID NO: 1332 - protein, 113 aa, synthetic construct; identical to SEQ ID NO: 352
  REGION 1..113: note = Synthetic construct

SEQ ID NO: 1333 - protein, 110 aa, synthetic construct; identical to SEQ ID NO: 383
  REGION 1..110: note = Synthetic construct

SEQ ID NO: 1334 - protein, 58 aa, synthetic construct; identical to SEQ ID NO: 384
  REGION 1..58: note = Synthetic construct

SEQ ID NO: 1335 - protein, 113 aa, synthetic construct; identical to SEQ ID NO: 352
  REGION 1..113: note = Synthetic construct

SEQ ID NO: 1336 - protein, 113 aa, synthetic construct; identical to SEQ ID NO: 352
  REGION 1..113: note = Synthetic construct

SEQ ID NO: 1337 - protein, 113 aa, synthetic construct; identical to SEQ ID NO: 352
  REGION 1..113: note = Synthetic construct

SEQ ID NO: 1338 - protein, 58 aa, synthetic construct; identical to SEQ ID NO: 370
  REGION 1..58: note = Synthetic construct

SEQ ID NO: 1339 - protein, 113 aa, synthetic construct; identical to SEQ ID NO: 352
  REGION 1..113: note = Synthetic construct

SEQ ID NO: 1340 - protein, 113 aa, synthetic construct; identical to SEQ ID NO: 352
  REGION 1..113: note = Synthetic construct

SEQ ID NO: 1341 - protein, 113 aa, synthetic construct; identical to SEQ ID NO: 352
  REGION 1..113: note = Synthetic construct

SEQ ID NO: 1342 - protein, 113 aa, synthetic construct; identical to SEQ ID NO: 392
  REGION 1..113: note = Synthetic construct

SEQ ID NO: 1343 - protein, 75 aa, synthetic construct; identical to SEQ ID NO: 393
  REGION 1..75: note = Synthetic construct

SEQ ID NO: 1344 - protein, 113 aa, synthetic construct; identical to SEQ ID NO: 352
  REGION 1..113: note = Synthetic construct

SEQ ID NO: 1345 - protein, 113 aa, synthetic construct; identical to SEQ ID NO: 352
  REGION 1..113: note = Synthetic construct

SEQ ID NO: 1346 - protein, 113 aa, synthetic construct; identical to SEQ ID NO: 352
  REGION 1..113: note = Synthetic construct

SEQ ID NO: 1347 - protein, 113 aa, synthetic construct; identical to SEQ ID NO: 352
  REGION 1..113: note = Synthetic construct

SEQ ID NO: 1348 - protein, 113 aa, synthetic construct; identical to SEQ ID NO: 352
  REGION 1..113: note = Synthetic construct

SEQ ID NO: 1349 - protein, 113 aa, synthetic construct; identical to SEQ ID NO: 352
  REGION 1..113: note = Synthetic construct

SEQ ID NO: 1350 - protein, 58 aa, synthetic construct; identical to SEQ ID NO: 370
  REGION 1..58: note = Synthetic construct

SEQ ID NO: 1351 - protein, 113 aa, synthetic construct; identical to SEQ ID NO: 401
  REGION 1..113: note = Synthetic construct

SEQ ID NO: 1352 - protein, 75 aa, synthetic construct; identical to SEQ ID NO: 393
  REGION 1..75: note = Synthetic construct

SEQ ID NO: 1353 - protein, 113 aa, synthetic construct; identical to SEQ ID NO: 352
  REGION 1..113: note = Synthetic construct

SEQ ID NO: 1354 - protein, 113 aa, synthetic construct; identical to SEQ ID NO: 352
  REGION 1..113: note = Synthetic construct

SEQ ID NO: 1355 - protein, 113 aa, synthetic construct; identical to SEQ ID NO: 352
  REGION 1..113: note = Synthetic construct

SEQ ID NO: 1356 - protein, 113 aa, synthetic construct; identical to SEQ ID NO: 352
  REGION 1..113: note = Synthetic construct

SEQ ID NO: 1357 - protein, 113 aa, synthetic construct; identical to SEQ ID NO: 352
  REGION 1..113: note = Synthetic construct

SEQ ID NO: 1358 - protein, 113 aa, synthetic construct; identical to SEQ ID NO: 352
  REGION 1..113: note = Synthetic construct

SEQ ID NO: 1359 - protein, 58 aa, synthetic construct; identical to SEQ ID NO: 370
  REGION 1..58: note = Synthetic construct

SEQ ID NO: 1360 - protein, 113 aa, synthetic construct; identical to SEQ ID NO: 352
  REGION 1..113: note = Synthetic construct

SEQ ID NO: 1361 - protein, 110 aa, synthetic construct; identical to SEQ ID NO: 411
  REGION 1..110: note = Synthetic construct

SEQ ID NO: 1362 - protein, 113 aa, synthetic construct; identical to SEQ ID NO: 352
  REGION 1..113: note = Synthetic construct

SEQ ID NO: 1363 - protein, 113 aa, synthetic construct; identical to SEQ ID NO: 413
  REGION 1..113: note = Synthetic construct

SEQ ID NO: 1364 - protein, 113 aa, synthetic construct; identical to SEQ ID NO: 414
  REGION 1..113: note = Synthetic construct

SEQ ID NO: 1365 - protein, 113 aa, synthetic construct; identical to SEQ ID NO: 352
  REGION 1..113: note = Synthetic construct

SEQ ID NO: 1366 - protein, 113 aa, synthetic construct; identical to SEQ ID NO: 352
  REGION 1..113: note = Synthetic construct

SEQ ID NO: 1367 - protein, 58 aa, synthetic construct; identical to SEQ ID NO: 370
  REGION 1..58: note = Synthetic construct

SEQ ID NO: 1368 - protein, 107 aa, synthetic construct
  REGION 1..107: note = Synthetic construct
EIVLTQSPATLSLSPGERATLSCRASQSVSRYLAWYQQKPGQAPRLLIYDASNRATGIPARFSGSGSGTDFTLTISSLQAEDVAVYYCQHFYSSPPTFGPGTTVAIK

SEQ ID NO: 1369 - protein, 113 aa, synthetic construct; identical to SEQ ID NO: 418
  REGION 1..113: note = Synthetic construct

SEQ ID NO: 1370 - protein, 113 aa, synthetic construct; identical to SEQ ID NO: 352
  REGION 1..113: note = Synthetic construct

SEQ ID NO: 1371 - protein, 113 aa, synthetic construct; identical to SEQ ID NO: 352
  REGION 1..113: note = Synthetic construct

SEQ ID NO: 1372 - protein, 58 aa, synthetic construct; identical to SEQ ID NO: 370
  REGION 1..58: note = Synthetic construct

SEQ ID NO: 1373 - protein, 113 aa, synthetic construct; identical to SEQ ID NO: 352
  REGION 1..113: note = Synthetic construct

SEQ ID NO: 1374 - protein, 113 aa, synthetic construct; identical to SEQ ID NO: 423
  REGION 1..113: note = Synthetic construct

SEQ ID NO: 1375 - protein, 113 aa, synthetic construct; identical to SEQ ID NO: 424
  REGION 1..113: note = Synthetic construct

SEQ ID NO: 1376 - protein, 113 aa, synthetic construct; identical to SEQ ID NO: 352
  REGION 1..113: note = Synthetic construct

SEQ ID NO: 1377 - protein, 113 aa, synthetic construct; identical to SEQ ID NO: 352
  REGION 1..113: note = Synthetic construct

SEQ ID NO: 1378 - protein, 75 aa, synthetic construct; identical to SEQ ID NO: 393
  REGION 1..75: note = Synthetic construct

SEQ ID NO: 1379 - protein, 113 aa, synthetic construct; identical to SEQ ID NO: 352
  REGION 1..113: note = Synthetic construct

SEQ ID NO: 1380 - protein, 113 aa, synthetic construct; identical to SEQ ID NO: 429
  REGION 1..113: note = Synthetic construct

SEQ ID NO: 1381 - protein, 113 aa, synthetic construct; identical to SEQ ID NO: 430
  REGION 1..113: note = Synthetic construct

SEQ ID NO: 1382 - protein, 113 aa, synthetic construct; identical to SEQ ID NO: 352
  REGION 1..113: note = Synthetic construct

SEQ ID NO: 1383 - protein, 58 aa, synthetic construct; identical to SEQ ID NO: 370
  REGION 1..58: note = Synthetic construct

SEQ ID NO: 1384 - protein, 113 aa, synthetic construct; identical to SEQ ID NO: 559
  REGION 1..113: note = Synthetic construct

SEQ ID NO: 1385 - protein, 113 aa, synthetic construct; identical to SEQ ID NO: 560
  REGION 1..113: note = Synthetic construct

SEQ ID NO: 1386 - protein, 113 aa, synthetic construct; identical to SEQ ID NO: 561
  REGION 1..113: note = Synthetic construct

SEQ ID NO: 1387 - protein, 113 aa, synthetic construct; identical to SEQ ID NO: 559
  REGION 1..113: note = Synthetic construct

SEQ ID NO: 1388 - protein, 108 aa, synthetic construct; identical to SEQ ID NO: 563
  REGION 1..108: note = Synthetic construct

SEQ ID NO: 1389 - protein, 113 aa, synthetic construct; identical to SEQ ID NO: 564
  REGION 1..113: note = Synthetic construct

SEQ ID NO: 1390 - protein, 113 aa, synthetic construct; identical to SEQ ID NO: 565
  REGION 1..113: note = Synthetic construct

SEQ ID NO: 1391 - protein, 113 aa, synthetic construct; identical to SEQ ID NO: 559
  REGION 1..113: note = Synthetic construct

SEQ ID NO: 1392 - protein, 113 aa, synthetic construct; identical to SEQ ID NO: 559
  REGION 1..113: note = Synthetic construct

SEQ ID NO: 1393 - protein, 113 aa, synthetic construct; identical to SEQ ID NO: 559
  REGION 1..113: note = Synthetic construct

SEQ ID NO: 1394 - protein, 113 aa, synthetic construct; identical to SEQ ID NO: 559
  REGION 1..113: note = Synthetic construct

SEQ ID NO: 1395 - protein, 113 aa, synthetic construct; identical to SEQ ID NO: 570
  REGION 1..113: note = Synthetic construct

SEQ ID NO: 1396 - protein, 113 aa, synthetic construct; identical to SEQ ID NO: 571
  REGION 1..113: note = Synthetic construct

SEQ ID NO: 1397 - protein, 113 aa, synthetic construct; identical to SEQ ID NO: 559
  REGION 1..113: note = Synthetic construct

SEQ ID NO: 1398 - protein, 113 aa, synthetic construct; identical to SEQ ID NO: 559
  REGION 1..113: note = Synthetic construct

SEQ ID NO: 1399 - protein, 109 aa, synthetic construct
  REGION 1..109: note = Synthetic construct
QSALTQPRSVSGSPGQSVTISCTGTSTYVDAFTYVSWYQQHPGRAPKVLIYDVNKRPSGVPDRFSGSKSGSTTSLTISDLHIEDEADYYCCLYAGSYSWVFGGGTKLTV

SEQ ID NO: 1400 - protein, 109 aa, synthetic construct
  REGION 1..109: note = Synthetic construct
QSALTQPRSVSGSTGQSVTISCTGTSSDVGGYNYVSWYQHLPGKAPKLIIYDVSERPSGFPDRSSGSKSGNTASLTISGLQAEDEANYYYCSYAGSYNWVFGGGTKVTV

SEQ ID NO: 1401 - protein, 110 aa, synthetic construct
  REGION 1..110: note = Synthetic construct
QSALTQPRSVSGSTGQSVTISCTGTRSDVGGYNYVSWYQHLPGKAPKLIIYDVSERPSGFPDRFSGSKSGNTASLTISGLQAEDEANYYCCSYAGRYNWVFGGGTKVTVL

SEQ ID NO: 1402 - protein, 110 aa, synthetic construct
  REGION 1..110: note = Synthetic construct
QSALTQPRSVSGSPGQSVTISCTGTSSDVGGYNYVSWYQQHPGKAPKLMIYDVSKRPSGVPDRFSGSKSGNTASLTISGLQAEDEADYYCCSYAGSYWAVFGGGTKLTVL

SEQ ID NO: 1403 - protein, 110 aa, synthetic construct
  REGION 1..110: note = Synthetic construct
QSALTQPRSVSWSPGQSVTISCTGTSSDVGGYNYVSWYQQHPGKAPKLMIYDVSKRPSGVPDRFSGSKSGNTASLTISGLQAEDEADYYCCSYAGSYWAVFGGGTKLTVL

SEQ ID NO: 1404 - protein, 110 aa, synthetic construct
  REGION 1..110: note = Synthetic construct
QSALTQPRSVSGSPGYSVTISCTGTSSDVGAYNYVSWYQQHPGEAPQLKIYDVSKRPSGVPDRFSGSRSGNTASLTISGLQAEDEADYFCCPYAGSYTWVFGGGTRLTVL

SEQ ID NO: 1405 - protein, 110 aa, synthetic construct
  REGION 1..110: note = Synthetic construct
QSALTQPRSVSGSPGQSVTISCTGTSSDVGGYNYVSWYQQHPGKAPKLMIYDVSKRPSGVPDRFSGSKSGNTASLTISGLQAEDEADYYCCTYAGSYTWVFGGGTKLTVL

SEQ ID NO: 1406 - protein, 108 aa, synthetic construct
  REGION 1..108: note = Synthetic construct
SYVLTQPPSVSVAPGQTARITCGGDYFEVKSVHWYQQKPGQAPVLVAFDDTDRPSGIPDRFSGSTSGNTATLTISRVEVGDEADYYCQVWDSSSEHVVFGGGSKLTVL

SEQ ID NO: 1407 - protein, 108 aa, synthetic construct
  REGION 1..108: note = Synthetic construct
SYVLTQPPSVSVAPGQTARITCGGNNIGSKSVHWYQQKPGQAPVLVVYADSDRPSGIPERFSGSNSGNTATLTISRVEAGDEADYYCQMWDSSSEHVVFGGGTKLTVL

SEQ ID NO: 1408 - protein, 81 aa, synthetic construct
  REGION 1..81: note = Synthetic construct
IGIRSVHWYRQKSRLAPTLVVYDDTERPSGIPERVSGSTSGDTATLTISRVEVGDEADYYCQAWDSSSDHVVYGGGTKLTV

SEQ ID NO: 1409 - protein, 107 aa, synthetic construct
  REGION 1..107: note = Synthetic construct
SYVLAQPPSVSVAPGRTAWITCGGNSIGSKSVHWYQQKPGQAPVLVVYDNNDRPSGIPERFSGSNSGNTATLTIYRVEVGDEADYYCQAWYSSSDHVVFGGGTKLTV

SEQ ID NO: 1410 - protein, 60 aa, synthetic construct
  REGION 1..60: note = Synthetic construct
DDSDRPSGIPERFSGSNSGNTATLTISRVEAGDEADYYCQMWDSSSDHVVFGGGTKLTVL

SEQ ID NO: 1411 - protein, 77 aa, synthetic construct
  REGION 1..77: note = Synthetic construct
VHWYQQEPGQAPMLVVYDDSDRPSGIPERFSGSNSGNTATLTISRVEAGDEADYYCQMWDSSSDHVVFGGGTKLTVL

SEQ ID NO: 1412 - protein, 57 aa, synthetic construct
  REGION 1..57: note = Synthetic construct
DRPSGIPERFSGSNSGNTATLTISRVEAGDEADYYCQMWDSSSDHVVFGGGTKLTVL

SEQ ID NO: 1413 - protein, 22 aa, synthetic construct
  REGION 1..22: note = Synthetic construct
CQMWDSSSDHVVFGGGTKLTVL

SEQ ID NO: 1414 - protein, 83 aa, synthetic construct
  REGION 1..83: note = Synthetic construct
NIGSKSVNWYQQKPGQAPVLVVSDDSDRPSGIPERFSGSNSGNTATLTISRVEAGDEADYYCQMWDSSSDHVVFGGGTKVTVL

SEQ ID NO: 1415 - protein, 77 aa, synthetic construct
  REGION 1..77: note = Synthetic construct
VHWYQQEPGQAPVLVVYDDSDRPSGIPERFSGSNSGNTATLTISRVEAGDEADYYCQMWDSSSDHVVFGGGTKLTVL

SEQ ID NO: 1416 - protein, 108 aa, synthetic construct
  REGION 1..108: note = Synthetic construct
SYVLTQPPSMSVAPGQTARITCGGNNIGSKSVHWYQQEPGQAPVLVVYDDSDRPSGIPERFSGSNSGNTATLTISRVEAGDEADYYCQMWDSSSDHVVFGGGTKLTVL

SEQ ID NO: 1417 - protein, 60 aa, synthetic construct; identical to SEQ ID NO: 1410
  REGION 1..60: note = Synthetic construct

SEQ ID NO: 1418 - protein, 57 aa, synthetic construct; identical to SEQ ID NO: 1412
  REGION 1..57: note = Synthetic construct

SEQ ID NO: 1419 - protein, 108 aa, synthetic construct
  REGION 1..108: note = Synthetic construct
SYVLTQPPSMSVAPGQTARITCGGNNIGTKSVHWYQQEPGQAPVLVVYDDGDRPSGIPERFSGSNSGNTATLTISRVEAGDEADYYCQMWDSSSDHVVFGGGTKLTVL

SEQ ID NO: 1420 - protein, 83 aa, synthetic construct
  REGION 1..83: note = Synthetic construct
KIRSKSVHWYQQRPGRAPVAVVFDDSGRPSGIPERFSGSNSGNTATLTISWVEAGDEADYYCQMWDSSSDHVVFGGGTKLTVL

SEQ ID NO: 1421 - protein, 22 aa, synthetic construct
  REGION 1..22: note = Synthetic construct
CQMWDSSSDHVVFGGGTKLTVL

SEQ ID NO: 1422 - protein, 60 aa, synthetic construct; identical to SEQ ID NO: 1410
  REGION 1..60: note = Synthetic construct

SEQ ID NO: 1423 - protein, 108 aa, synthetic construct
  REGION 1..108: note = Synthetic construct
SYVLTQPPSVSVAPGHTARITCGGNNIGSKSVHWYQQEPGQAPVLVVYDDSDRPSGIPERFSGSNSGNTATLTISGVEAGDEADYYCQMWDSSSDHVVFGGGTKLTVL

SEQ ID NO: 1424 - protein, 60 aa, synthetic construct; identical to SEQ ID NO: 1410
  REGION 1..60: note = Synthetic construct

SEQ ID NO: 1425 - protein, 22 aa, synthetic construct
  REGION 1..22: note = Synthetic construct
CQMWDSSSDHVVFGGGTKLTVL

SEQ ID NO: 1426 - protein, 22 aa, synthetic construct
  REGION 1..22: note = Synthetic construct
CQMWDSSSDHVVFGGGTKLTVL

SEQ ID NO: 1427 - protein, 108 aa, synthetic construct
  REGION 1..108: note = Synthetic construct
SYVLTQPPSMSVAPGQPARITCGGNNIGSKSVHWYQQEPGQAPVLVVYDDSDRPSGIPERFSGSNSGNTATLTISGVEAGDEADYYCQMWDSSSDHVVFGGGTKLTVL

SEQ ID NO: 1428 - protein, 60 aa, synthetic construct; identical to SEQ ID NO: 1410
  REGION 1..60: note = Synthetic construct

SEQ ID NO: 1429 - protein, 22 aa, synthetic construct
  REGION 1..22: note = Synthetic construct
CQMWDSSSDHVVFGGGTKLTVL

SEQ ID NO: 1430 - protein, 83 aa, synthetic construct; identical to SEQ ID NO: 1414
  REGION 1..83: note = Synthetic construct

SEQ ID NO: 1431 - protein, 83 aa, synthetic construct
  REGION 1..83: note = Synthetic construct
NIGSKSVHWYQQEPGQAPVLVVYDDSDRPSGIPERFSGSNSGNTATLTISRVEAGDEADYYCQMWDSSSDHVVFGGGTKLTVL

SEQ ID NO: 1432 - protein, 83 aa, synthetic construct; identical to SEQ ID NO: 1414
  REGION 1..83: note = Synthetic construct

SEQ ID NO: 1433 - protein, 22 aa, synthetic construct
  REGION 1..22: note = Synthetic construct
CQMWDSSSDHVVFGGGTKLTVL

SEQ ID NO: 1434 - protein, 60 aa, synthetic construct; identical to SEQ ID NO: 1410
  REGION 1..60: note = Synthetic construct

SEQ ID NO: 1435 - protein, 60 aa, synthetic construct; identical to SEQ ID NO: 1410
  REGION 1..60: note = Synthetic construct

SEQ ID NO: 1436 - protein, 60 aa, synthetic construct; identical to SEQ ID NO: 1410
  REGION 1..60: note = Synthetic construct

SEQ ID NO: 1437 - protein, 108 aa, synthetic construct
  REGION 1..108: note = Synthetic construct
SYVLTQPPSVSVAPGQTARITCGGNNIGSKSVHWYQQKPGQAPVLVVYDDSDRPSGIPERFSGSNSGNTATLTISRVEAGDEADYYCQMWDSSSDHVVFGGGTKLTVL

SEQ ID NO: 1438 - protein, 22 aa, synthetic construct
  REGION 1..22: note = Synthetic construct
CQMWDSSSDHVVFGGGTKLTVL

SEQ ID NO: 1439 - protein, 108 aa, synthetic construct; identical to SEQ ID NO: 1416
  REGION 1..108: note = Synthetic construct

SEQ ID NO: 1440 - protein, 81 aa, synthetic construct
  REGION 1..81: note = Synthetic construct
IGIRSVHWYRQKSRLAPTLVVYDDTERPSGIPERVSGSTSGDTATLTISRVEVGDEADYYCQAWDSSSDHVVFGGGTKLTV

SEQ ID NO: 1441 - protein, 107 aa, synthetic construct
  REGION 1..107: note = Synthetic construct
SYILTQPPSVSVAPGQTATITCGGYNIRSKSVHWYQQRPGQAPVAVVYDDSGRPSGIPARFSGSNSGNTATLTISRVEAGDEADYYCQAWDSSSDHVVFGGGTKLTV

SEQ ID NO: 1442 - protein, 81 aa, synthetic construct; identical to SEQ ID NO: 1440
  REGION 1..81: note = Synthetic construct

SEQ ID NO: 1443 - protein, 81 aa, synthetic construct; identical to SEQ ID NO: 1440
  REGION 1..81: note = Synthetic construct

SEQ ID NO: 1444 - protein, 81 aa, synthetic construct; identical to SEQ ID NO: 1440
  REGION 1..81: note = Synthetic construct

SEQ ID NO: 1445 - protein, 81 aa, synthetic construct; identical to SEQ ID NO: 1440
  REGION 1..81: note = Synthetic construct

SEQ ID NO: 1446 - protein, 81 aa, synthetic construct; identical to SEQ ID NO: 1440
  REGION 1..81: note = Synthetic construct

SEQ ID NO: 1447 - protein, 81 aa, synthetic construct; identical to SEQ ID NO: 1440
  REGION 1..81: note = Synthetic construct

SEQ ID NO: 1448 - protein, 81 aa, synthetic construct; identical to SEQ ID NO: 1440
  REGION 1..81: note = Synthetic construct

SEQ ID NO: 1449 - protein, 81 aa, synthetic construct; identical to SEQ ID NO: 1440
  REGION 1..81: note = Synthetic construct

SEQ ID NO: 1450 - protein, 108 aa, synthetic construct
  REGION 1..108: note = Synthetic construct
SYVLTQPPSVSVAPGQTARITCGGNNIGSISVHWYQQRPGQAPVLVVYDDSDRPSGVPGRFSGANSGNTATLSISRVEAGDEADYYCQAWDSSSDHVVFGGGTKLTVL

SEQ ID NO: 1451 - protein, 81 aa, synthetic construct; identical to SEQ ID NO: 1440
  REGION 1..81: note = Synthetic construct

SEQ ID NO: 1452 - protein, 81 aa, synthetic construct; identical to SEQ ID NO: 1440
  REGION 1..81: note = Synthetic construct

SEQ ID NO: 1453 - protein, 81 aa, synthetic construct
  REGION 1..81: note = Synthetic construct
IGIRSVHWYRQKSRLAPTLVVYDDTERPSGIPERVSGSTSEDTATLTISRVEFGDEADYYCQAWDSSSDHVVFGGGTKLTV

SEQ ID NO: 1454 - protein, 81 aa, synthetic construct; identical to SEQ ID NO: 1440
  REGION 1..81: note = Synthetic construct

SEQ ID NO: 1455 - protein, 81 aa, synthetic construct
  REGION 1..81: note = Synthetic construct
IGIRSVHWYRQKSRLAPTLVVYDDTERPSGIPERVPGSTSGDTATLTISRVEVGDEADYYCQAWDSSSDHVVFGGGTKLTV

SEQ ID NO: 1456 - protein, 81 aa, synthetic construct
  REGION 1..81: note = Synthetic construct
IGIRSVHWYRQKARLAPTLVVYDDTARPSGIPERVSGSTSGDTATLTISRVEVGDEADYYCQAWDSSSDHVVFGGGTKLTV

SEQ ID NO: 1457 - protein, 81 aa, synthetic construct; identical to SEQ ID NO: 1440
  REGION 1..81: note = Synthetic construct

SEQ ID NO: 1458 - protein, 81 aa, synthetic construct; identical to SEQ ID NO: 1440
  REGION 1..81: note = Synthetic construct

SEQ ID NO: 1459 - protein, 81 aa, synthetic construct; identical to SEQ ID NO: 1440
  REGION 1..81: note = Synthetic construct

SEQ ID NO: 1460 - protein, 81 aa, synthetic construct; identical to SEQ ID NO: 1440
  REGION 1..81: note = Synthetic construct

SEQ ID NO: 1461 - protein, 81 aa, synthetic construct; identical to SEQ ID NO: 1440
  REGION 1..81: note = Synthetic construct

SEQ ID NO: 1462 - protein, 81 aa, synthetic construct; identical to SEQ ID NO: 1440
  REGION 1..81: note = Synthetic construct

SEQ ID NO: 1463 - protein, 83 aa, synthetic construct
  REGION 1..83: note = Synthetic construct
NIGSKSVHWYQQKPGQAPVLVVYDDSDRPSGIPERFSGSNSGNTATLTISRVEAGDEADYYCQAWDSSSDHVVFGGGTKLTVL

SEQ ID NO: 1464 - protein, 81 aa, synthetic construct; identical to SEQ ID NO: 1440
  REGION 1..81: note = Synthetic construct

SEQ ID NO: 1465 - protein, 81 aa, synthetic construct; identical to SEQ ID NO: 1440
  REGION 1..81: note = Synthetic construct

SEQ ID NO: 1466 - protein, 81 aa, synthetic construct; identical to SEQ ID NO: 1440
  REGION 1..81: note = Synthetic construct

SEQ ID NO: 1467 - protein, 108 aa, synthetic construct
  REGION 1..108: note = Synthetic construct
SYVLTQPPSVSVAPGQTARIACGGNSIGSKGVHWYQQKPGQAPALVVYDDSDRPSGIPERFSGSNSGNTATLTISRVEVGDEADYYCQVWDSSSEHVVFGGGTKLTVL

SEQ ID NO: 1468 - protein, 108 aa, synthetic construct
  REGION 1..108: note = Synthetic construct
SYVLTQPPSVSVAPGKTARISCGGDYFEIKSVHWYQQKPGQAPVLVVFDDTDRPSGIPARFSGSNSGNTATLTISRVEVGDEADYYCQVWDSSSEHVVFGGGSKLTVL

SEQ ID NO: 1469 - protein, 60 aa, synthetic construct
  REGION 1..60: note = Synthetic construct
DDSDRPSGIPERFSGSNSGNTATLTISRVEVGDEADYYCQVWDSSSEHVVFGGGSKLTVL

SEQ ID NO: 1470 - protein, 108 aa, synthetic construct
  REGION 1..108: note = Synthetic construct
SYVLTQPPSVSVAPGKTARITCGGDYFEVKSVHWYQQKPGQAPVLVVFGDTDRPSGIPERFSGSNSGNTATLTISRVEVGDEADYYCQVWDSSSEHVVFGGGSKLTVL

SEQ ID NO: 1471 - protein, 108 aa, synthetic construct
  REGION 1..108: note = Synthetic construct
SYVLTQPPSVSVAPGQTARITSGGNNIGSISVHWYQQRPGQAPVLVVYDDSDRPSGIPERFSGSNSGNTATLSISRVEAGDEADYYCQVWDSSSEHVVFGGGTKLTVL

SEQ ID NO: 1472 - protein, 108 aa, synthetic construct
  REGION 1..108: note = Synthetic construct
SYVLTQSPSVSEAPGKTARITCGGSYIGSKSVHWYQQKPGQAPVLVVYDDSDRPSGIPDRFSGSNSGNTATLTISRVEAGDEADYYCQVWDSSSEHVVFGGGTKLTVL

SEQ ID NO: 1473 - protein, 108 aa, synthetic construct
  REGION 1..108: note = Synthetic construct
SYVLTQPPSVSVAPGKTARITCGGDYFEVKSVHWYQQKPGQAPVLVVFDDTDRPSGIPERFSGSNSGNTATLTISRVEVGDEADYYCQVWDSSSEHVVFGGGSKLTVL

SEQ ID NO: 1474 - protein, 108 aa, synthetic construct
  REGION 1..108: note = Synthetic construct
SYVLTQPPSVSVAPGKTARISCGGDYFGIKSVHWYQQKPGQAPVLVVFDDTDRPSGIPERFSGSNSGNTATLTISRVEVGDEADYYCQVWDSSSEHVVFGGGSKLTVL

SEQ ID NO: 1475 - protein, 108 aa, synthetic construct; identical to SEQ ID NO: 1474
  REGION 1..108: note = Synthetic construct

SEQ ID NO: 1476 - protein, 108 aa, synthetic construct
  REGION 1..108: note = Synthetic construct
SYVLTQPPSVTVAPGKTATITCGGSYFDIKSVHWYQQKPGQAPVLVVFDDTDRPSGIPERFSGSNSGNTATLTISRVEVGDEADYYCQVWDSSSEHVVFGGGSKLTVL

SEQ ID NO: 1477 - protein, 108 aa, synthetic construct
  REGION 1..108: note = Synthetic construct
SYVLTQPPSVSVAPGKTARISCGGDYFEIKSVHWYQQKPGQAPVLVVFDDTDRPSGIPERFSGSNSGNTATLTISRVEVGDEADYYCQVWDSSSEHVVFGGGSKLTVL

SEQ ID NO: 1478 - protein, 60 aa, synthetic construct; identical to SEQ ID NO: 1469
  REGION 1..60: note = Synthetic construct

SEQ ID NO: 1479 - protein, 108 aa, synthetic construct
  REGION 1..108: note = Synthetic construct
SYVLTQPPSVSVAPGKTARISCGGVYFGIKSVHWYQQKPGQAPVLVVFDDTDRPSGIPERFSGSNSGNTATLTISRVEVGDEADYYCQVWDSSSEHVVFGGGSKLTVL

SEQ ID NO: 1480 - protein, 108 aa, synthetic construct
  REGION 1..108: note = Synthetic construct
SYVLTQPPSVTVAPGKTATITCGGSYFDIKSVHWYQQKPGQAPVLVVFDDTDRPSGIPERFSGSNSGNTATLTISRVEVGDEANYYCQVWDSSSEHVVFGGGSKLTVL

SEQ ID NO: 1481 - protein, 108 aa, synthetic construct
  REGION 1..108: note = Synthetic construct
SYVLTQPPSVSVAPGKTARITCGGDYFEVKSVHWYQQKPGQAPVVVVFDDTDRPSGIPERFSGSNSGNTATLTISRVEVGDEADYYCQVWDSSSEHVVFGGGTKLTVL

SEQ ID NO: 1482 - protein, 108 aa, synthetic construct
  REGION 1..108: note = Synthetic construct
SYVLTQPPSVSVAPGKTARITCGGDYFEVKSVHWYQQKPGQAPVVVVFDDTDRPSGIPERFSGSNSGNTATLTISRVEVGDEADYYCQVWDSSSEHVVFGGGTKVTVL

SEQ ID NO: 1483 - protein, 22 aa, synthetic construct
  REGION 1..22: note = Synthetic construct
CQVWDSSSEHVVFGGWTKLTVL

SEQ ID NO: 1484 - protein, 108 aa, synthetic construct; identical to SEQ ID NO: 1481
  REGION 1..108: note = Synthetic construct

SEQ ID NO: 1485 - protein, 108 aa, synthetic construct
  REGION 1..108: note = Synthetic construct
SYVLTQPPSVSVAPGKTARITCGGDYFEVKSVHWYQQKPGQAPVVVVFDDTDRPSGIPERFSGSNSGNTATLTITRVEVGDEADYYCQVWDSSSEHVVFGGGTKLTVL

SEQ ID NO: 1486 - protein, 108 aa, synthetic construct
  REGION 1..108: note = Synthetic construct
SYVLTQPPSVSVAPGKTARITCGGDYFEVKSVHWYQQKPGQAPVLVVFDDTDRPSGIPERFSGPNSGNTATLTISRGEVGDEADYYCQVWDSSSEHVVFGGGSKLTVL

SEQ ID NO: 1487 - protein, 108 aa, synthetic construct; identical to SEQ ID NO: 1481
  REGION 1..108: note = Synthetic construct

SEQ ID NO: 1488 - protein, 108 aa, synthetic construct; identical to SEQ ID NO: 1474
  REGION 1..108: note = Synthetic construct

SEQ ID NO: 1489 - protein, 108 aa, synthetic construct; identical to SEQ ID NO: 1474
  REGION 1..108: note = Synthetic construct

SEQ ID NO: 1490 - protein, 108 aa, synthetic construct
  REGION 1..108: note = Synthetic construct
SYVLTQPPSVTVAPGKTATITCGGSYFDIKSVHWYQQKPGQAPVLVVFDDTDRPSGSPERFSGSNSGNTATLTISRVEVGDEADYYCQVWDSSSEHVVFGGGSKLTVL

SEQ ID NO: 1491 - protein, 108 aa, synthetic construct; identical to SEQ ID NO: 1474
  REGION 1..108: note = Synthetic construct

SEQ ID NO: 1492 - protein, 82 aa, synthetic construct
  REGION 1..82: note = Synthetic construct
FGIKSVHWYQQKPGQAPVLVVFDDTDRPSGIPERFSGSNSGNTATLTISRVEVGDEADYYCQVWDSSSEHVVFGGGSKLTVL

SEQ ID NO: 1493 - protein, 83 aa, synthetic construct
  REGION 1..83: note = Synthetic construct
KIRSKSVHWYQQRPGRAPVAVVFDDSGRPSGIPERFSGSNSGNTATLTISWVEAGDEADYYCQVWDSSSEHVVFGGGTKLTVL

SEQ ID NO: 1494 - protein, 108 aa, synthetic construct; identical to SEQ ID NO: 1481
  REGION 1..108: note = Synthetic construct

SEQ ID NO: 1495 - protein, 108 aa, synthetic construct
  REGION 1..108: note = Synthetic construct
SYVLTQPPSVSVAPGKTARITCGGDYFEVKSVHWYQQKPGQAPVVVVFDDTDRPSGIPERFSGSNSGNTATLTISRVEIGDEADYYCQVWDSSSEHVVFGGGTKLTVL

SEQ ID NO: 1496 - protein, 60 aa, synthetic construct; identical to SEQ ID NO: 1469
  REGION 1..60: note = Synthetic construct

SEQ ID NO: 1497 - protein, 107 aa, synthetic construct
  REGION 1..107: note = Synthetic construct
SYVVTQPPSVSVAPGKTARITCGGNNIGNKAVHWYQQRPGQAPVLVIYDDSDRRSGIPERFSGSNSGHTATLTISGVEGGDEADYYCQVWDSSSEHVVFGGGTKLTV

SEQ ID NO: 1498 - protein, 108 aa, synthetic construct
  REGION 1..108: note = Synthetic construct
SYVLTQPPSVSVAPGKTARITCGGDYFEVKSVHWYQQKPGQAPVVVVFDDTDRPSGIPERFSGANAGNTATLTISRVEVGDEADYYCQVWDSSSEHVVFGGGTKLTVL

SEQ ID NO: 1499 - protein, 108 aa, synthetic construct
  REGION 1..108: note = Synthetic construct
SYVLTQPPSVSVAPGKTARISCGGDYFGIKSVHWYQQKPGQAPVLVVFDDTDRPSGIPERVSGSNSGNTATLTISRVEVGDEADYYCQVWDSSSEHVVFGGGSKLTVL

SEQ ID NO: 1500 - protein, 108 aa, synthetic construct
  REGION 1..108: note = Synthetic construct
SYVLTQPPSLSVAPGKTARITCGGDYFEVKSIHWYQQKPGQAPVVVVFDDTDRPSGIPERFSGSNSGNTATLTISRVEVGDEADYYCQVWDSSSEHVVFGGGTKLTVL

SEQ ID NO: 1501 - protein, 108 aa, synthetic construct; identical to SEQ ID NO: 1474
  REGION 1..108: note = Synthetic construct

SEQ ID NO: 1502 - protein, 108 aa, synthetic construct; identical to SEQ ID NO: 1477
  REGION 1..108: note = Synthetic construct

SEQ ID NO: 1503 - protein, 108 aa, synthetic construct; identical to SEQ ID NO: 1476
  REGION 1..108: note = Synthetic construct

SEQ ID NO: 1504 - protein, 108 aa, synthetic construct; identical to SEQ ID NO: 1481
  REGION 1..108: note = Synthetic construct

SEQ ID NO: 1505 - protein, 108 aa, synthetic construct; identical to SEQ ID NO: 1476
  REGION 1..108: note = Synthetic construct

SEQ ID NO: 1506 - protein, 108 aa, synthetic construct; identical to SEQ ID NO: 1477
  REGION 1..108: note = Synthetic construct

SEQ ID NO: 1507 - protein, 22 aa, synthetic construct
  REGION 1..22: note = Synthetic construct
CQVWDSSSEHVVFGGGSKLTVL

SEQ ID NO: 1508 - protein, 60 aa, synthetic construct
  REGION 1..60: note = Synthetic construct
DDTDRPSGIPERFSGSNSGNTATLTISRVEVGDEADYYCQVWDSSSEHVVFGGGSKLTVL

SEQ ID NO: 1509 - protein, 108 aa, synthetic construct
  REGION 1..108: note = Synthetic construct
SYVLTQPPSVTVAPGKTATITCGGNYFEIKSVHWYQQKPGQAPVLVVYDDSDRPSGIPERFSGSNSGNTATLTISRVEVGDEADYYCQVWDSSSEHVVFGGGSKLTVL

SEQ ID NO: 1510 - protein, 22 aa, synthetic construct
  REGION 1..22: note = Synthetic construct
CQVWDSSSEHVVFGGGTKLTVL

SEQ ID NO: 1511 - protein, 108 aa, synthetic construct; identical to SEQ ID NO: 1481
  REGION 1..108: note = Synthetic construct

SEQ ID NO: 1512 - protein, 108 aa, synthetic construct
  REGION 1..108: note = Synthetic construct
SSVLTQPPSVSVAPGQTARITCGGSNIGTHSVHWYQQKPGQAPVLVVYDSSHRPSGIPERFSGSNSGNTATLTISRVEAGDEADYYCQVWDSSSEHVVFGGGTKLTVL

SEQ ID NO: 1513 - protein, 108 aa, synthetic construct
  REGION 1..108: note = Synthetic construct
SYVLTQPPSVSVAPGKTARISCGGVYFEIKSVHWYQQKPGQAPVLVVFDDTDRPSGIPERFSGSNSGNTATLTISRVEVGDEADYYCQVWDSSSEHVVFGGGSKLTVL

SEQ ID NO: 1514 - protein, 22 aa, synthetic construct
  REGION 1..22: note = Synthetic construct
CQVWDSSSEHVVFGGGSKLTVL

SEQ ID NO: 1515 - protein, 108 aa, synthetic construct; identical to SEQ ID NO: 1474
  REGION 1..108: note = Synthetic construct

SEQ ID NO: 1516 - protein, 22 aa, synthetic construct
  REGION 1..22: note = Synthetic construct
CQVWDSSSEHVVFGGGSKLTVL

SEQ ID NO: 1517 - protein, 108 aa, synthetic construct
  REGION 1..108: note = Synthetic construct
SYGLTQPPSVTVAPGKTATITCGGSYFDIKSVHWYQQKPGQAPVLVVFDDTDRPSGIPERFSGSNSGNTATLTISRVEVGDEADYYCQVWDSSSEHVVFGGGSKLTVL

SEQ ID NO: 1518 - protein, 107 aa, synthetic construct
  REGION 1..107: note = Synthetic construct
SYVVTQPPSVSVAPGKTARINCGGNKIGNKAVHWYQQRPGQAPVLVIYDDSDRRSGIPERFSGSNSGHTATLTISGVEGGDEADYYCQVWDSSSEHVVFGGGTKLTV

SEQ ID NO: 1519 - protein, 108 aa, synthetic construct; identical to SEQ ID NO: 1474
  REGION 1..108: note = Synthetic construct

SEQ ID NO: 1520 - protein, 82 aa, synthetic construct
  REGION 1..82: note = Synthetic construct
FDIKSVHWYQQKPGQAPVLVVFDDTDRPSGIPERFSGSNSGNTATLTISRVEVGDEADYYCQVWDSSSEHVVFGGGSKLTVL

SEQ ID NO: 1521 - protein, 108 aa, synthetic construct
  REGION 1..108: note = Synthetic construct
SYVLTQPPSVSVAPGKTARISYGGDYFGIKSVHWYQQKPGQAPVLAVFDDTDRPSGIPERFSGSNSGNTATLTISRVEVGDEADYYCQVWDSSSEHVVFGGGSKLTVL

SEQ ID NO: 1522 - protein, 108 aa, synthetic construct; identical to SEQ ID NO: 1481
  REGION 1..108: note = Synthetic construct

SEQ ID NO: 1523 - protein, 108 aa, synthetic construct; identical to SEQ ID NO: 1476
  REGION 1..108: note = Synthetic construct

SEQ ID NO: 1524 - protein, 108 aa, synthetic construct
  REGION 1..108: note = Synthetic construct
SYILTQPPSVSVAPGQTATITCGGYNIRSKSVHWYQQRPGQAPVAVVYDDSGRPSGIPARFSGSNSGNTATLTISRVEAGDEADYYCQVWDSSSEHVVFGGGTKLTVL

SEQ ID NO: 1525 - protein, 108 aa, synthetic construct; identical to SEQ ID NO: 1477
  REGION 1..108: note = Synthetic construct

SEQ ID NO: 1526 - protein, 77 aa, synthetic construct
  REGION 1..77: note = Synthetic construct
VHWYQQKPGQAPVLVVFDDTDRPSGIPERFSGSNFGNMATLTISRVEVGDEADYYCQVWDSSSEHVVFGGGSKLTVL

SEQ ID NO: 1527 - protein, 22 aa, synthetic construct
  REGION 1..22: note = Synthetic construct
CQVWDSSSEHVVFGGGSKLTVL

SEQ ID NO: 1528 - protein, 22 aa, synthetic construct
  REGION 1..22: note = Synthetic construct
CQVWDSSSEHVVFGGGTKLTVL

SEQ ID NO: 1529 - protein, 108 aa, synthetic construct; identical to SEQ ID NO: 1481
  REGION 1..108: note = Synthetic construct

SEQ ID NO: 1530 - protein, 108 aa, synthetic construct
  REGION 1..108: note = Synthetic construct
SYVLTQPPSVTVAPGKTATITCGGSYFDIKSVHWYQQEPGQAPVLVVFDDTDRPSGIPERFSGSNSGNTATLTISRVEVGDEADYYCQVWDSSSEHVVFGGVSKLTVL

SEQ ID NO: 1531 - protein, 107 aa, synthetic construct; identical to SEQ ID NO: 1497
  REGION 1..107: note = Synthetic construct

SEQ ID NO: 1532 - protein, 22 aa, synthetic construct
  REGION 1..22: note = Synthetic construct
CQVWDSSSEHVVFGGGSKLTVL

SEQ ID NO: 1533 - protein, 108 aa, synthetic construct
  REGION 1..108: note = Synthetic construct
SYVLTQPPSVSVAPGKTARISCGGDYFGIKSVHWYQQKPGQAPVLVVFDDTDRPSGISERFSGSNSGNTATLTISRVEVGDEADYYCQVWDSSSEHVVFGGGSKLTVL

SEQ ID NO: 1534 - protein, 108 aa, synthetic construct
  REGION 1..108: note = Synthetic construct
SYVLTQPPSVSGAPGKTARISCGGDYFEIKSVHWYQQKPGQAPVLVVFDDTDRPSGIPERFSGSNSGNTATLTISRVEVGDEADYYCQVWDSSSEHVVFGGGSKLTVL

SEQ ID NO: 1535 - protein, 108 aa, synthetic construct
  REGION 1..108: note = Synthetic construct
SYVLTQPPSVSVAPGKTARISCGGDYFGIKSVHWYQQKPGQAPVLVVFDDTDRPSGIPERFSGSKSGNTATLTISRVEVGDEADYYCQVWDSSSEHVVFGGGSKLTVL

SEQ ID NO: 1536 - protein, 108 aa, synthetic construct; identical to SEQ ID NO: 1474
  REGION 1..108: note = Synthetic construct

SEQ ID NO: 1537 - protein, 107 aa, synthetic construct
  REGION 1..107: note = Synthetic construct
SYVVTQQPSVSVAPGKTARITCGGNNIGNKAVHWYQQRPGQAPVLVIYDDSDRRSGIPERFSGSNSGHTATLTISGVEGGDEADYYCQVWDSSSEHVVFGGGTKLTV

SEQ ID NO: 1538 - protein, 82 aa, synthetic construct
  REGION 1..82: note = Synthetic construct
FGVKSVHWYQQKPGQAPVVVVFDDTDRPSGIPEGFSGSNSGNTATLTISRVEVGDEADNYCQVWDSSSEHVVFGGGTKLTVL

SEQ ID NO: 1539 - protein, 108 aa, synthetic construct
  REGION 1..108: note = Synthetic construct
SYVLTQPPSVSVAPGKTARITCGGDYFEVKSVHWYQQKPGQAPVVVVFDDTDRPSGIPERFSGSNSGNTATLTISGVEVGDEADYYCQVWDSSSEHVVFGGGTKLTVL

SEQ ID NO: 1540 - protein, 108 aa, synthetic construct
  REGION 1..108: note = Synthetic construct
SHVLTQPPSVSVPPGQTARFTCEGNNIGSKSVHWYLQKPGQAPVLVVYDDDDRPSGIPERFSGSNSGNTATLTISRVEVGDEADYYCQVWDSSSEHVVFGGGSKLTVL

SEQ ID NO: 1541 - protein, 108 aa, synthetic construct
  REGION 1..108: note = Synthetic construct
SYVLTQPPSVSVAPGKTARITCEGNNIGSKNVHWYQQKPGQAPVLVVYDDSDRPSGIPERFSGPNSGNTAILTISRVEAGDEADYYCQVWDSSSEHVVFGGGSKLTVL

SEQ ID NO: 1542 - protein, 107 aa, synthetic construct
  REGION 1..107: note = Synthetic construct
SYVVTQPPSVSVAPGKTARITCGGNNIGNKAVHWYQQRPGQAPVLVIYDDSDRRSGIPERFSGSNSGHTATLTIGGVEGGDEADYYCQVWDSSSEHVVFGGGTKLTV

SEQ ID NO: 1543 - protein, 108 aa, synthetic construct; identical to SEQ ID NO: 1473
  REGION 1..108: note = Synthetic construct

SEQ ID NO: 1544 - protein, 108 aa, synthetic construct; identical to SEQ ID NO: 1476
  REGION 1..108: note = Synthetic construct

SEQ ID NO: 1545 - protein, 108 aa, synthetic construct; identical to SEQ ID NO: 1477
  REGION 1..108: note = Synthetic construct

SEQ ID NO: 1546 - protein, 108 aa, synthetic construct; identical to SEQ ID NO: 1474
  REGION 1..108: note = Synthetic construct

SEQ ID NO: 1547 - protein, 108 aa, synthetic construct; identical to SEQ ID NO: 1476
  REGION 1..108: note = Synthetic construct

SEQ ID NO: 1548 - protein, 108 aa, synthetic construct; identical to SEQ ID NO: 1476
  REGION 1..108: note = Synthetic construct

SEQ ID NO: 1549 - protein, 108 aa, synthetic construct; identical to SEQ ID NO: 1473
  REGION 1..108: note = Synthetic construct

SEQ ID NO: 1550 - protein, 108 aa, synthetic construct
  REGION 1..108: note = Synthetic construct
SYVLTQPPSVSVAPGKTARITCGGDYFEVKSVHWYQQKPGQAPVLVVFDDTDRPSGIPERFSGSNSGNTATLTISRVEVGDEADYYCQVWDSSSEHVVFGGGGKLTVL

SEQ ID NO: 1551 - protein, 60 aa, synthetic construct; identical to SEQ ID NO: 1508
  REGION 1..60: note = Synthetic construct

SEQ ID NO: 1552 - protein, 60 aa, synthetic construct; identical to SEQ ID NO: 1508
  REGION 1..60: note = Synthetic construct

SEQ ID NO: 1553 - protein, 107 aa, synthetic construct; identical to SEQ ID NO: 1497
  REGION 1..107: note = Synthetic construct

SEQ ID NO: 1554 - protein, 108 aa, synthetic construct; identical to SEQ ID NO: 1477
  REGION 1..108: note = Synthetic construct

SEQ ID NO: 1555 - protein, 22 aa, synthetic construct
  REGION 1..22: note = Synthetic construct
CQVWDSSSEHVVFGGGSKLTVL

SEQ ID NO: 1556 - protein, 82 aa, synthetic construct; identical to SEQ ID NO: 1492
  REGION 1..82: note = Synthetic construct

SEQ ID NO: 1557 - protein, 60 aa, synthetic construct; identical to SEQ ID NO: 1469
  REGION 1..60: note = Synthetic construct

SEQ ID NO: 1558 - protein, 22 aa, synthetic construct
  REGION 1..22: note = Synthetic construct
CQVWDSSSEHVVFGGGSKLTVL

SEQ ID NO: 1559 - protein, 108 aa, synthetic construct
  REGION 1..108: note = Synthetic construct
SYVLTQPPSVTVAPGKTATITCGGNYFEIKSVHWYQQKPGQAPVLVVFDDSDRPSGIPERFSGSNSGNTATLTISRVEVGDEADYYCQVWDSSSEHVVFGVGSKLTVL

SEQ ID NO: 1560 - protein, 108 aa, synthetic construct
  REGION 1..108: note = Synthetic construct
SYVLTQPPSVTVAPGKTATITCGGSYFDIKSVHWYQQKPGQAPVLVVFDDIDRPSGIPERFSGSNSGNTATLTISRVEVGDEADYYCQVWDSSSEHVVFGGGSKLTVL

SEQ ID NO: 1561 - protein, 108 aa, synthetic construct; identical to SEQ ID NO: 1481
  REGION 1..108: note = Synthetic construct

SEQ ID NO: 1562 - protein, 108 aa, synthetic construct
  REGION 1..108: note = Synthetic construct
SYVLTQPPSVSVAPGKTTRITCGGDYFEVKSVHWYQQKPGQAPVLVVFDDTDRPSGIPERFSGSNSGNTATLTISRVEVGDEADYYCQVWDSSSEHVVFGGGSKLTVL

SEQ ID NO: 1563 - protein, 60 aa, synthetic construct; identical to SEQ ID NO: 1469
  REGION 1..60: note = Synthetic construct

SEQ ID NO: 1564 - protein, 22 aa, synthetic construct
  REGION 1..22: note = Synthetic construct
CQVWDSSSEHVVFGGGSKLTVL

SEQ ID NO: 1565 - protein, 108 aa, synthetic construct
  REGION 1..108: note = Synthetic construct
SYVLTQPPSVSVAPGKTARISCGGDYFGIKSVHWYQQKPGQAPVLVVFDDTDRPSGIPERFSGSNSWNTATLTISRVEVGDEADYYCQVWDSSSEHVVFGGGSKLTVL

SEQ ID NO: 1566 - protein, 22 aa, synthetic construct
  REGION 1..22: note = Synthetic construct
CQVWDSSSEHVVFGGGSKLTVL

SEQ ID NO: 1567 - protein, 82 aa, synthetic construct
  REGION 1..82: note = Synthetic construct
FGIKSVHWYQQKPGQAPVLVVFDDTDRPSGIPERFSGSNSGNTATLTISRVEVGDKADYYCQVWDSSSEHVVFGGGSKLTVL

SEQ ID NO: 1568 - protein, 108 aa, synthetic construct; identical to SEQ ID NO: 1476
  REGION 1..108: note = Synthetic construct

SEQ ID NO: 1569 - protein, 22 aa, synthetic construct
  REGION 1..22: note = Synthetic construct
CQVWDSSSEHVVFGGGSKLTVL

SEQ ID NO: 1570 - protein, 108 aa, synthetic construct; identical to SEQ ID NO: 1481
  REGION 1..108: note = Synthetic construct

SEQ ID NO: 1571 - protein, 108 aa, synthetic construct; identical to SEQ ID NO: 1476
  REGION 1..108: note = Synthetic construct

SEQ ID NO: 1572 - protein, 60 aa, synthetic construct; identical to SEQ ID NO: 1508
  REGION 1..60: note = Synthetic construct

SEQ ID NO: 1573 - protein, 108 aa, synthetic construct; identical to SEQ ID NO: 1481
  REGION 1..108: note = Synthetic construct

SEQ ID NO: 1574 - protein, 108 aa, synthetic construct; identical to SEQ ID NO: 1476
  REGION 1..108: note = Synthetic construct

SEQ ID NO: 1575 - protein, 108 aa, synthetic construct
  REGION 1..108: note = Synthetic construct
SYVLTQPPSVSVAPGKTARISCGGDYFGIKSVHWYQQKPGQAPVLVVFDDTDRLSGIPERFSGSNSGNTATLTISRVEVGDEADYYCQVWDSSSEHVVFGGGSKLTVL

SEQ ID NO: 1576 - protein, 108 aa, synthetic construct; identical to SEQ ID NO: 1481
  REGION 1..108: note = Synthetic construct

SEQ ID NO: 1577 - protein, 108 aa, synthetic construct; identical to SEQ ID NO: 1474
  REGION 1..108: note = Synthetic construct

SEQ ID NO: 1578 - protein, 22 aa, synthetic construct
  REGION 1..22: note = Synthetic construct
CQVWDSSSEHVVFGGGSKLTVL

SEQ ID NO: 1579 - protein, 108 aa, synthetic construct; identical to SEQ ID NO: 1481
  REGION 1..108: note = Synthetic construct

SEQ ID NO: 1580 - protein, 108 aa, synthetic construct; identical to SEQ ID NO: 1476
  REGION 1..108: note = Synthetic construct

SEQ ID NO: 1581 - protein, 108 aa, synthetic construct; identical to SEQ ID NO: 1481
  REGION 1..108: note = Synthetic construct

SEQ ID NO: 1582 - protein, 108 aa, synthetic construct
  REGION 1..108: note = Synthetic construct
SYVLTQPPSVSVAPGQTARITCGGNDIGSKSVHWYQQKPGQAPVLVVYDDSDRPSGIPERFSGSNSGNTATLTISRVEAGDEAGYYCQVWDSSSEHVVFGGGTKLTVL

SEQ ID NO: 1583 - protein, 22 aa, synthetic construct
  REGION 1..22: note = Synthetic construct
CQVWDSSSEHVVFGGGSKLTVL

SEQ ID NO: 1584 - protein, 108 aa, synthetic construct; identical to SEQ ID NO: 1473
  REGION 1..108: note = Synthetic construct

SEQ ID NO: 1585 - protein, 108 aa, synthetic construct; identical to SEQ ID NO: 1481
  REGION 1..108: note = Synthetic construct

SEQ ID NO: 1586 - protein, 107 aa, synthetic construct
  REGION 1..107: note = Synthetic construct
SYVVTQPPSVSVAPGKTARITCGGNNIGNKAVHWYQQRPGQAPVLVIYDDSDRRSGIPERFSGSNAGHTATLTISGVEGGDEADYYCQVWDSSSEHVVFGGGTKLTV

SEQ ID NO: 1587 - protein, 22 aa, synthetic construct
  REGION 1..22: note = Synthetic construct
CQVWDSSSEHVVFGGGSKLTVL

SEQ ID NO: 1588 - protein, 108 aa, synthetic construct; identical to SEQ ID NO: 1474
  REGION 1..108: note = Synthetic construct

SEQ ID NO: 1589 - protein, 108 aa, synthetic construct
  REGION 1..108: note = Synthetic construct
SYVLTQPPSVSVAPGKTARITCGGDYFEVKSIHWYQQKPGQAPVVVVFDDTDRPSGIPERFSGSNSGNTATLTISRVEVGDEADYYCQVWDSSSEHVVFGGGTKLTVL

SEQ ID NO: 1590 - protein, 108 aa, synthetic construct; identical to SEQ ID NO: 1474
  REGION 1..108: note = Synthetic construct

SEQ ID NO: 1591 - protein, 107 aa, synthetic construct; identical to SEQ ID NO: 1497
  REGION 1..107: note = Synthetic construct

SEQ ID NO: 1592 - protein, 22 aa, synthetic construct
  REGION 1..22: note = Synthetic construct
CQVWDSSSEHVVFGGGTKLTVL

SEQ ID NO: 1593 - protein, 22 aa, synthetic construct
  REGION 1..22: note = Synthetic construct
CQVWDSSSEHVVFGGGSKLTVL

SEQ ID NO: 1594 - protein, 22 aa, synthetic construct
  REGION 1..22: note = Synthetic construct
CQVWDSSSEHVVFGGGSKLTVL

SEQ ID NO: 1595 - protein, 108 aa, synthetic construct
  REGION 1..108: note = Synthetic construct
SYVLTQPPSVSVAPGKTARITCGGDNIGSKSVHWYQQKPGQAPVLVVYDDSDRPSGIPERFSGSNFGNTATLTISRVEAGDEADYYCQVWDSSSEHVVFGGGTKLTVL

SEQ ID NO: 1596 - protein, 108 aa, synthetic construct; identical to SEQ ID NO: 1477
  REGION 1..108: note = Synthetic construct

SEQ ID NO: 1597 - protein, 108 aa, synthetic construct; identical to SEQ ID NO: 1476
  REGION 1..108: note = Synthetic construct

SEQ ID NO: 1598 - protein, 108 aa, synthetic construct
  REGION 1..108: note = Synthetic construct
SYVLTQPPSVSVAPGKTARISCGGDYFGIKSVHWYQQKPGQAPVLVVFDDTDRPSGIPERFSSSNSGNTATLTISRVEVGDEADYYCQVWDSSSEHVVFGGGSKLTVL

SEQ ID NO: 1599 - protein, 22 aa, synthetic construct
  REGION 1..22: note = Synthetic construct
CQVWDSSSEHVVFGGGSKLTVL

SEQ ID NO: 1600 - protein, 22 aa, synthetic construct
  REGION 1..22: note = Synthetic construct
CQVWDSSSEHVVFGGGTKLTVL

SEQ ID NO: 1601 - protein, 60 aa, synthetic construct; identical to SEQ ID NO: 1469
  REGION 1..60: note = Synthetic construct

SEQ ID NO: 1602 - protein, 108 aa, synthetic construct; identical to SEQ ID NO: 1481
  REGION 1..108: note = Synthetic construct

SEQ ID NO: 1603 - protein, 22 aa, synthetic construct
  REGION 1..22: note = Synthetic construct
CQVWDSSSEHVVFGGGSKLTVL

SEQ ID NO: 1604 - protein, 108 aa, synthetic construct; identical to SEQ ID NO: 1476
  REGION 1..108: note = Synthetic construct

SEQ ID NO: 1605 - protein, 108 aa, synthetic construct; identical to SEQ ID NO: 1481
  REGION 1..108: note = Synthetic construct

SEQ ID NO: 1606 - protein, 108 aa, synthetic construct; identical to SEQ ID NO: 1476
  REGION 1..108: note = Synthetic construct

SEQ ID NO: 1607 - protein, 22 aa, synthetic construct
  REGION 1..22: note = Synthetic construct
CQVWDSSSEHVVFGGGSKLTVL

SEQ ID NO: 1608 - protein, 108 aa, synthetic construct; identical to SEQ ID NO: 1481
  REGION 1..108: note = Synthetic construct

SEQ ID NO: 1609 - protein, 22 aa, synthetic construct
  REGION 1..22: note = Synthetic construct
CQVWDSSSEHVVFGGGSKLTVL

SEQ ID NO: 1610 - protein, 60 aa, synthetic construct; identical to SEQ ID NO: 1508
  REGION 1..60: note = Synthetic construct

SEQ ID NO: 1611 - protein, 108 aa, synthetic construct; identical to SEQ ID NO: 1474
  REGION 1..108: note = Synthetic construct

SEQ ID NO: 1612 - protein, 59 aa, synthetic construct
  REGION 1..59: note = Synthetic construct
DDSDRRSGIPERFSGSNSGHTATLTISGVEGGDEADYYCQVWDSSSEHVVFGGGTKLTV

SEQ ID NO: 1613 - protein, 108 aa, synthetic construct; identical to SEQ ID NO: 1481
  REGION 1..108: note = Synthetic construct

SEQ ID NO: 1614 - protein, 60 aa, synthetic construct; identical to SEQ ID NO: 1508
  REGION 1..60: note = Synthetic construct

SEQ ID NO: 1615 - protein, 22 aa, synthetic construct
  REGION 1..22: note = Synthetic construct
CQVWDSSSEHVVFGGGSKLTVL

SEQ ID NO: 1616 - protein, 108 aa, synthetic construct; identical to SEQ ID NO: 1476
  REGION 1..108: note = Synthetic construct

SEQ ID NO: 1617 - protein, 108 aa, synthetic construct; identical to SEQ ID NO: 1534
  REGION 1..108: note = Synthetic construct

SEQ ID NO: 1618 - protein, 108 aa, synthetic construct; identical to SEQ ID NO: 1474
  REGION 1..108: note = Synthetic construct

SEQ ID NO: 1619 - protein, 108 aa, synthetic construct; identical to SEQ ID NO: 1474
  REGION 1..108: note = Synthetic construct

SEQ ID NO: 1620 - protein, 22 aa, synthetic construct
  REGION 1..22: note = Synthetic construct
CQVWDSSSEHVVFGGGSKLTVL

SEQ ID NO: 1621 - protein, 22 aa, synthetic construct
  REGION 1..22: note = Synthetic construct
CQVWDSSSEHVVFGGGSKLTVL

SEQ ID NO: 1622 - protein, 22 aa, synthetic construct
  REGION 1..22: note = Synthetic construct
CQVWDSSSEHVVFGGGSKLTVL

SEQ ID NO: 1623 - protein, 108 aa, synthetic construct; identical to SEQ ID NO: 1481
  REGION 1..108: note = Synthetic construct

SEQ ID NO: 1624 - protein, 22 aa, synthetic construct
  REGION 1..22: note = Synthetic construct
CQVWDSSSEHVVFGGGSKLTVL

SEQ ID NO: 1625 - protein, 22 aa, synthetic construct
  REGION 1..22: note = Synthetic construct
CQVWDSSSEHVVFGGGSKLTVL

SEQ ID NO: 1626 - protein, 59 aa, synthetic construct; identical to SEQ ID NO: 1612
  REGION 1..59: note = Synthetic construct

SEQ ID NO: 1627 - protein, 82 aa, synthetic construct
  REGION 1..82: note = Synthetic construct
FEIKSVHWYQQKPGQAPVLVVFDDSDRPSGIPERFSGSNSGNTATLTISRVEVGDEADYYCQVWDSSSEHVVFGGGSKLTVL

SEQ ID NO: 1628 - protein, 77 aa, synthetic construct
  REGION 1..77: note = Synthetic construct
VHWYQQKPGQAPVLVVFDDTDRPSGIPERFSGSNSGNTATLTISRVEVGDEADYYCQVWDSSSEHVVFGGGSKLTVL

SEQ ID NO: 1629 - protein, 108 aa, synthetic construct; identical to SEQ ID NO: 1476
  REGION 1..108: note = Synthetic construct

SEQ ID NO: 1630 - protein, 22 aa, synthetic construct
  REGION 1..22: note = Synthetic construct
CQVWDSSSEHVVFGGGTKLTVL

SEQ ID NO: 1631 - protein, 108 aa, synthetic construct; identical to SEQ ID NO: 1477
  REGION 1..108: note = Synthetic construct

SEQ ID NO: 1632 - protein, 22 aa, synthetic construct
  REGION 1..22: note = Synthetic construct
CQVWDSSSEHVVFGGGSKLTVL

SEQ ID NO: 1633 - protein, 60 aa, synthetic construct; identical to SEQ ID NO: 1469
  REGION 1..60: note = Synthetic construct

SEQ ID NO: 1634 - protein, 60 aa, synthetic construct; identical to SEQ ID NO: 1508
  REGION 1..60: note = Synthetic construct

SEQ ID NO: 1635 - protein, 108 aa, synthetic construct; identical to SEQ ID NO: 1477
  REGION 1..108: note = Synthetic construct

SEQ ID NO: 1636 - protein, 108 aa, synthetic construct; identical to SEQ ID NO: 1476
  REGION 1..108: note = Synthetic construct

SEQ ID NO: 1637 - protein, 108 aa, synthetic construct
  REGION 1..108: note = Synthetic construct
SYVLTQPPSVTVAPGKTATITCGGSYFDIKSIHWYQQKPGQAPVLVVFDDTDRPSGIPERFSGSNSGNTATLTISRVEVGDEADYYCQVWDSSSEHVVFGGGSKLTVL

SEQ ID NO: 1638 - protein, 108 aa, synthetic construct; identical to SEQ ID NO: 1473
  REGION 1..108: note = Synthetic construct

SEQ ID NO: 1639 - protein, 83 aa, synthetic construct
  REGION 1..83: note = Synthetic construct
NIGSKSVHWYQQKPGQAPVLVVFDDTDRPSGIPERFSGSNSGNTATLTISRVEVGDEADYYCQVWDSSSEHVVFGGGSKLTVL

SEQ ID NO: 1640 - protein, 108 aa, synthetic construct; identical to SEQ ID NO: 1474
  REGION 1..108: note = Synthetic construct

SEQ ID NO: 1641 - protein, 82 aa, synthetic construct; identical to SEQ ID NO: 1492
  REGION 1..82: note = Synthetic construct

SEQ ID NO: 1642 - protein, 22 aa, synthetic construct
  REGION 1..22: note = Synthetic construct
CQVWDSSSEHVVFGGGTKLTVL

SEQ ID NO: 1643 - protein, 108 aa, synthetic construct; identical to SEQ ID NO: 1476
  REGION 1..108: note = Synthetic construct

SEQ ID NO: 1644 - protein, 60 aa, synthetic construct; identical to SEQ ID NO: 1469
  REGION 1..60: note = Synthetic construct

SEQ ID NO: 1645 - protein, 108 aa, synthetic construct
  REGION 1..108: note = Synthetic construct
SYVLTQPPSVSVAPGKMARITCGGDYFEVKSVHWYQQKPGQAPVVVVFDDTDRPSGIPERFSGSNSGNTATLTISRVEVGDEADYYCQVWDSSSEHVVFGGGTKLTVL

SEQ ID NO: 1646 - protein, 108 aa, synthetic construct; identical to SEQ ID NO: 1481
  REGION 1..108: note = Synthetic construct

SEQ ID NO: 1647 - protein, 22 aa, synthetic construct
  REGION 1..22: note = Synthetic construct
CQVWDSSSEHVVFGGGSKLTVL

SEQ ID NO: 1648 - protein, 108 aa, synthetic construct; identical to SEQ ID NO: 1474
  REGION 1..108: note = Synthetic construct

SEQ ID NO: 1649 - protein, 108 aa, synthetic construct; identical to SEQ ID NO: 1474
  REGION 1..108: note = Synthetic construct

SEQ ID NO: 1650 - protein, 108 aa, synthetic construct; identical to SEQ ID NO: 1476
  REGION 1..108: note = Synthetic construct

SEQ ID NO: 1651 - protein, 22 aa, synthetic construct
  REGION 1..22: note = Synthetic construct
CQVWDSSSEHVVFGGGSKLTVL

SEQ ID NO: 1652 - protein, 60 aa, synthetic construct; identical to SEQ ID NO: 1469
  REGION 1..60: note = Synthetic construct

SEQ ID NO: 1653 - protein, 90 aa, synthetic construct
  REGION 1..90: note = Synthetic construct
SYVLTQPPSVSVAPGQTARITCGGNNIGSKSDSDRPSGIPARFSGSNSGNTATLTISRVEAGDEADYYCQVWDSSSEHVVFGGGTKLTVL

SEQ ID NO: 1654 - protein, 108 aa, synthetic construct; identical to SEQ ID NO: 1481
  REGION 1..108: note = Synthetic construct

SEQ ID NO: 1655 - protein, 108 aa, synthetic construct
  REGION 1..108: note = Synthetic construct
SYVLTQPPSVSVAPGKAARITCGGDYFEVKSVHWYQQKPGQAPVVVVFDDTDRPSGIPERFSGSNSWNTATLTISRVEVGDEADYYCQVWDSSSEHVVFGGGTKLTVL

SEQ ID NO: 1656 - protein, 82 aa, synthetic construct
  REGION 1..82: note = Synthetic construct
FLTKSVHWYQQQPGQAPVLVVYDDSDRPSGIPERFSGSNSGKTATLTISRVEAGDEADFYCQVWDSSSEHVVFGGGNKLTVL

SEQ ID NO: 1657 - protein, 107 aa, synthetic construct; identical to SEQ ID NO: 1497
  REGION 1..107: note = Synthetic construct

SEQ ID NO: 1658 - protein, 108 aa, synthetic construct; identical to SEQ ID NO: 1481
  REGION 1..108: note = Synthetic construct

SEQ ID NO: 1659 - protein, 108 aa, synthetic construct
  REGION 1..108: note = Synthetic construct
SYVLTQPPSVTVAPGKTATITCGGSYFDIKSVHWYQQKPGQAPVLVVFDDTDRPSGIPERFSGSNSGNTATLTISRVEGGDEADYYCQVWDSSSEHVVFGGGSKLTVL

SEQ ID NO: 1660 - protein, 108 aa, synthetic construct; identical to SEQ ID NO: 1474
  REGION 1..108: note = Synthetic construct

SEQ ID NO: 1661 - protein, 108 aa, synthetic construct
  REGION 1..108: note = Synthetic construct
SYVLTQPPSVTVAPGKTATITCGGSYFDIKSVHWYQQKPGQAPVLVVFDDTDRPSGIPERFSGSNSGNTDTLTISRVEVGDEADYYCQVWDSSSEHVVFGGGSKLTVL

SEQ ID NO: 1662 - protein, 107 aa, synthetic construct
  REGION 1..107: note = Synthetic construct
SYVVTQPPSVSVAPGKTARITCGGNNIGNKAVHWYQQRPGQAPVLVIYDDSDRRSGIPERFSASNSGHTATLTISGVEGGDEADYYCQVWDSSSEHVVFGGGTKLTV

SEQ ID NO: 1663 - protein, 108 aa, synthetic construct; identical to SEQ ID NO: 1481
  REGION 1..108: note = Synthetic construct

SEQ ID NO: 1664 - protein, 107 aa, synthetic construct; identical to SEQ ID NO: 1497
  REGION 1..107: note = Synthetic construct

SEQ ID NO: 1665 - protein, 108 aa, synthetic construct
  REGION 1..108: note = Synthetic construct
SYVPTQPPSVSVAPGKTARISCGGDYFEIKSVHWYQQKPGQAPALVVFDDTDRPSGIPARFSGSNSGNTATLTISRVEVGDEADYYCQVWDSSSEHVVFGGGSKLTVL

SEQ ID NO: 1666 - protein, 108 aa, synthetic construct; identical to SEQ ID NO: 1481
  REGION 1..108: note = Synthetic construct

SEQ ID NO: 1667 - protein, 60 aa, synthetic construct; identical to SEQ ID NO: 1469
  REGION 1..60: note = Synthetic construct

SEQ ID NO: 1668 - protein, 108 aa, synthetic construct
  REGION 1..108: note = Synthetic construct
SYVLTQPPSVSVAPGKTARISCGGDYFEIKSVHWYQQKPGQAPVLIVFDDTDRPSGIPERVSGSNSGNTATLTISRVEVGDEADYYCQVWDSSSEHVVFGGGSKLTVL

SEQ ID NO: 1669 - protein, 108 aa, synthetic construct; identical to SEQ ID NO: 1476
  REGION 1..108: note = Synthetic construct

SEQ ID NO: 1670 - protein, 77 aa, synthetic construct; identical to SEQ ID NO: 1628
  REGION 1..77: note = Synthetic construct

SEQ ID NO: 1671 - protein, 60 aa, synthetic construct; identical to SEQ ID NO: 1508
  REGION 1..60: note = Synthetic construct

SEQ ID NO: 1672 - protein, 82 aa, synthetic construct; identical to SEQ ID NO: 1492
  REGION 1..82: note = Synthetic construct

SEQ ID NO: 1673 - protein, 107 aa, synthetic construct; identical to SEQ ID NO: 1497
  REGION 1..107: note = Synthetic construct

SEQ ID NO: 1674 - protein, 22 aa, synthetic construct
  REGION 1..22: note = Synthetic construct
CQVWDSSSEHVVFGGGSKLTVL

SEQ ID NO: 1675 - protein, 60 aa, synthetic construct; identical to SEQ ID NO: 1508
  REGION 1..60: note = Synthetic construct

SEQ ID NO: 1676 - protein, 22 aa, synthetic construct
  REGION 1..22: note = Synthetic construct
CQVWDSSSEHVVFGGGSKLTVL

SEQ ID NO: 1677 - protein, 22 aa, synthetic construct
  REGION 1..22: note = Synthetic construct
CQVWDSSSEHVVFGGGTKLTVL

SEQ ID NO: 1678 - protein, 22 aa, synthetic construct
  REGION 1..22: note = Synthetic construct
CQVWDSSSEHVVFGGGSKLTVL

SEQ ID NO: 1679 - protein, 108 aa, synthetic construct; identical to SEQ ID NO: 1476
  REGION 1..108: note = Synthetic construct

SEQ ID NO: 1680 - protein, 59 aa, synthetic construct
  REGION 1..59: note = Synthetic construct
DTDRPSGIPERFSGSNSGNTATLTISRVEVGDEADYYCQVWDSSSEHVVFGGGSKLTVL

SEQ ID NO: 1681 - protein, 60 aa, synthetic construct; identical to SEQ ID NO: 1469
  REGION 1..60: note = Synthetic construct

SEQ ID NO: 1682 - protein, 22 aa, synthetic construct
  REGION 1..22: note = Synthetic construct
CQVWDSSSEHVVFGGGSKLTVL

SEQ ID NO: 1683 - protein, 108 aa, synthetic construct
  REGION 1..108: note = Synthetic construct
SYELTQPPSVSVAPGKTARISCGGDYFGIKSVHWYQQKPGQAPVLVVFDDTDRPSGIPERFSGSNSGNTATLTISRVEVGDEADYYCQVWDSSSEHVVFGGGSKLTVL

SEQ ID NO: 1684 - protein, 60 aa, synthetic construct; identical to SEQ ID NO: 1469
  REGION 1..60: note = Synthetic construct

SEQ ID NO: 1685 - protein, 22 aa, synthetic construct
  REGION 1..22: note = Synthetic construct
CQVWDSSSEHVVFGGGSKLTVL

SEQ ID NO: 1686 - protein, 60 aa, synthetic construct; identical to SEQ ID NO: 1469
  REGION 1..60: note = Synthetic construct

SEQ ID NO: 1687 - protein, 22 aa, synthetic construct
  REGION 1..22: note = Synthetic construct
CQVWDSSSEHVVFGGGSKLTVL

SEQ ID NO: 1688 - protein, 108 aa, synthetic construct; identical to SEQ ID NO: 1474
  REGION 1..108: note = Synthetic construct

SEQ ID NO: 1689 - protein, 108 aa, synthetic construct; identical to SEQ ID NO: 1474
  REGION 1..108: note = Synthetic construct

SEQ ID NO: 1690 - protein, 108 aa, synthetic construct
  REGION 1..108: note = Synthetic construct
SYVLTQPPSVTVAPGKTATITCGGSYFDIKSVHWYQQKPGQAPVLVVFDDTDRPSGVPERFSGSNSGNTATLTISRVEVGDEADYYCQVWDSSSEHVVFGGGSKLTVL

SEQ ID NO: 1691 - protein, 81 aa, synthetic construct
  REGION 1..81: note = Synthetic construct
IGIRSVHWYRQKSRLAPTLVVYDDTERPSGIPERVSGSTSGDTATLTISRVEVGDEADYYCQACDSSSDHVVFGGGTKLTV

SEQ ID NO: 1692 - protein, 108 aa, synthetic construct
  REGION 1..108: note = Synthetic construct
SYVLTQPPSVSVAPGQTARITCGGNNIGSKSVHWYQQKPGQAPVLVVHDDSDRPSGIPERFSGSNSGNTATLTISRVEAGDEADYYCQAWDSSNDHVVFGGGTKLTVL

SEQ ID NO: 1693 - protein, 108 aa, synthetic construct
  REGION 1..108: note = Synthetic construct
SYVLTQPPSVSVAPGQTARITCGGNIIGSKSVHWYQQKPGQAPVVVVYDDSDRPTGIPERFSGSNSGNTATLTISRVEAGDEADYYCQLWDSSSEHVVFGGGTKLTAL

SEQ ID NO: 1694 - protein, 123 aa, synthetic construct
  REGION 1..123: note = Synthetic construct
QVRLEQSGAEVMKPGASVKVSCRASGYSFTPFYILWVRQAPGQGLEWMGIINPSGGGTTYAQSFQGRVTMTRDRSTNTVYMELRSLRSEDTAVYFCARVAPPGVVNNKWFDIWGQGTLVTVSS

SEQ ID NO: 1695 - protein, 123 aa, synthetic construct
  REGION 1..123: note = Synthetic construct
QVHLVQSGTEVKQPGASVKVSCKASGYTFTTYYINWVRQAPGQGLEWVGMINPTGGSTTYAQKFQGRVTLTRDRSTSTVYMELRSLRSEDTAVFYCARVPPPGVVNNKWLDLWGQGTLVTVSS

SEQ ID NO: 1696 - protein, 64 aa, synthetic construct
  REGION 1..64: note = Synthetic construct
YAQKFQGRVTLTRDRSTSTVYMELRSLRSEDTAVFYCARVPPPGVVNNKWLDLWGQGTLVTVSS

SEQ ID NO: 1697 - protein, 64 aa, synthetic construct; identical to SEQ ID NO: 1696
  REGION 1..64: note = Synthetic construct

SEQ ID NO: 1698 - protein, 64 aa, synthetic construct; identical to SEQ ID NO: 1696
  REGION 1..64: note = Synthetic construct

SEQ ID NO: 1699 - protein, 123 aa, synthetic construct
  REGION 1..123: note = Synthetic construct
QVHLVQSGTEVKQPGASVKASCKASGYTFTTYYINWVRQAPGQGLEWVGMINPTGGSTTYAQKFQGRVTLTRDRSTSTVYMELRSLRSEDTAVFYCARVPPPGVVNNKWLDLWGQGTLVTVSS

SEQ ID NO: 1700 - protein, 123 aa, synthetic construct
  REGION 1..123: note = Synthetic construct
QVHLVQSGTEVKQPGASVKVSCKASGYTFTTYYINWVRQAPGQGLEWVGMINPTGGSTTYALEFQGRVTLTRDRSTSTVYMELRSLRSEDTAVFYCARVPPPGVVNNKWLDLWGQGTLVTVSS

SEQ ID NO: 1701 - protein, 123 aa, synthetic construct; identical to SEQ ID NO: 1695
  REGION 1..123: note = Synthetic construct

SEQ ID NO: 1702 - protein, 123 aa, synthetic construct
  REGION 1..123: note = Synthetic construct
QVQLVQSGAEVKKPGASVRVSCKASGYTFTGFYINWVRQAPGQGLEWMAIINPSGITTSIAEKFQGRVTMTRDTSTSTVYMELRSLRSEDTAVYYCARGPPPGVANHKWFDTWGQGTLVTVSS

SEQ ID NO: 1703 - protein, 73 aa, synthetic construct
  REGION 1..73: note = Synthetic construct
INPSGGGTTYAQSFQGRVTMTRDRSTSTVYMELRSLRSEDTAVYYCARVAPPGVVNNKWFDTWGQGTLVTVSS

SEQ ID NO: 1704 - protein, 123 aa, synthetic construct
  REGION 1..123: note = Synthetic construct
QVRLEQSGAEVMKPGASVKVSCRASGYSFTPFYILWVRQATGQGLEWMGIINPSGGGTTYAQSFQGRVTMTRDRSTSTVYMELRSLRSEDTAVYYCARVAPPGVVNNKWFDTWGQGTLVTVSS

SEQ ID NO: 1705 - protein, 123 aa, synthetic construct; identical to SEQ ID NO: 1704
  REGION 1..123: note = Synthetic construct

SEQ ID NO: 1706 - protein, 123 aa, synthetic construct
  REGION 1..123: note = Synthetic construct
QVRLEQSGAEVMKPGASVKVSCRASGYSFTPFYILWVRQATGQGLEWMGIINPSGGGTTYAQSFQGRVTMTRDRSTSTVYMELRSLRSKDTAVYYCARVAPPGVVNNKWFDTWGQGTLVTVSS

SEQ ID NO: 1707 - protein, 123 aa, synthetic construct
  REGION 1..123: note = Synthetic construct
QVRLEQSGAEVMKPGASVKVSCRASGYSFTPFYILWVRQATGQGLEWMGIINPRGGGTTYAQSFQGRVTMTRDRSTSTVYMELRSLRSEDTAVYYCARVAPPGVVNNKWFDTWGQGTLVTVSS

SEQ ID NO: 1708 - protein, 98 aa, synthetic construct
  REGION 1..98: note = Synthetic construct
GYSFTPFYILWVRQATGQGLEWMGIINPSGGGTTYAQSFQGRVTMTRDRSTSTVYMELRSLRSEDTAVYYCARVAPPGVVNNKWFDTWGQGTLVTVSS

SEQ ID NO: 1709 - protein, 73 aa, synthetic construct; identical to SEQ ID NO: 1703
  REGION 1..73: note = Synthetic construct

SEQ ID NO: 1710 - protein, 98 aa, synthetic construct; identical to SEQ ID NO: 1708
  REGION 1..98: note = Synthetic construct

SEQ ID NO: 1711 - protein, 98 aa, synthetic construct
  REGION 1..98: note = Synthetic construct
GYTFTGFYINWVRQAPGQGLEWMAIINPSGITTSIAEKFQGRVTMTRDTSTSTVYMELRSLRSEDTAVYYCARVPPPGVANHKWFDTWGQGTLVTVSS

SEQ ID NO: 1712 - protein, 98 aa, synthetic construct; identical to SEQ ID NO: 1711
  REGION 1..98: note = Synthetic construct

SEQ ID NO: 1713 - protein, 98 aa, synthetic construct; identical to SEQ ID NO: 1711
  REGION 1..98: note = Synthetic construct

SEQ ID NO: 1714 - protein, 98 aa, synthetic construct; identical to SEQ ID NO: 1711
  REGION 1..98: note = Synthetic construct

SEQ ID NO: 1715 - protein, 123 aa, synthetic construct
  REGION 1..123: note = Synthetic construct
QVHLVQSGADVKKPGASVKISCKASGNAFTPYYMSWVRQAPGQGLEWLGIINPSGGSTTYAPKFQGRLTMTRDRSANTVYMELSGLTSEDTAVYFCARITPPGVVNNKWFDLWGQGALVTVSS

SEQ ID NO: 1716 - protein, 122 aa, synthetic construct
  REGION 1..122: note = Synthetic construct
QVQLVQSGAEVKKPGASVKVSRKASGNTFSRYYINWVRQAPGQGLQWMGIINPSGKTSGFAQIFQGRLTMTSDASTNTGCMEMSSLRSEDTAVYYCARVSPPGVVNKKWFDIWGQGTLVTVS

SEQ ID NO: 1717 - protein, 96 aa, synthetic construct
  REGION 1..96: note = Synthetic construct
NTFSRYYINWVRQAPGQGLQWMGIINPSGKTSGFAQIFQGRLTMTSDASTNTVFMEMSSLRSEDTAVYYCARVSPPGVVNKKWFDIWGQGTLVTVS

SEQ ID NO: 1718 - protein, 126 aa, synthetic construct
  REGION 1..126: note = Synthetic construct
EGQVVESGGGLVQPGGSLRLSCAVSGLTFSTSEFAWVRQAPGKGLEWLSFIGRGSSIYYADSVRGRFTVSRDNAKNSLYLQMNSLRVEDTALYYCARSEKRVTMTRKIKGRWFGPWGQGTLVTVSS

SEQ ID NO: 1719 - protein, 125 aa, synthetic construct
  REGION 1..125: note = Synthetic construct
EVQLVESGGGLVQPGGSLRLSCEVSGLTFTTSEFNWVRQAPGKGLEWLSFGRGSTIYYADSVKGRFTVSRDNAKSSLYLQMSSLRVEYTALYYCTRSEKRITLARKIKGRWFDPWGQGTLVTVSS

SEQ ID NO: 1720 - protein, 99 aa, synthetic construct
  REGION 1..99: note = Synthetic construct
TFTTSEFNWVRQAPGKGLEWLSFIGRGSTIYYADSVKGRFTVSRDNAKSSLYLQMSSLRVEDTALYYCTRSEKRITLARKIKGRWFDPWGQGTPVTVSS

SEQ ID NO: 1721 - protein, 99 aa, synthetic construct
  REGION 1..99: note = Synthetic construct
TFTTSEFNWVRQAPGKGLEWLSFIGRGSTIYYADSVKGRFTVSRDNAKSSLYLQMSSLRVEDTALYYCTRSEKRITLARKIKGRWFDPWGQGTLVTVSS

SEQ ID NO: 1722 - protein, 99 aa, synthetic construct
  REGION 1..99: note = Synthetic construct
TFTTSEFNWVRQAPGKGLEWLSFIGRGSTIYYADSVKGRFTVSRDNAKSSLYLQMSSLRVEDTALYYCTRSEKRITLARKIKGRWFDPWGQGILVTVSS

SEQ ID NO: 1723 - protein, 94 aa, synthetic construct
  REGION 1..94: note = Synthetic construct
GLTFRTSEFNWVRQAPGKGLEWLSYYYADSVKGRFTVSRDNTKNSVYLQMDSLKVEDTALYYCTRSENRLTLARKIKGRWFGPWGQGTLVTVSS

SEQ ID NO: 1724 - protein, 125 aa, synthetic construct
  REGION 1..125: note = Synthetic construct
EVQLVESGGGLVQPGGSLRLSCPVSGLTVSTSEFTWVRQAPGKGLEWLSYGRGSTIYYADSVKGRFTVSRDNAKNSLYLQLNSLRVEDTAVYYCSRSEPRKTTARKIKGRWFDPWGQGILVTVSS

SEQ ID NO: 1725 - protein, 74 aa, synthetic construct
  REGION 1..74: note = Synthetic construct
RGSTIYYADSVKGRFTVSRDNAKNSLYLQLNSLRVEDTAVYYCSRSEPRKTTARKIKGRWFDPWGQGILVTVSS

SEQ ID NO: 1726 - protein, 74 aa, synthetic construct; identical to SEQ ID NO: 1725
  REGION 1..74: note = Synthetic construct

SEQ ID NO: 1727 - protein, 74 aa, synthetic construct; identical to SEQ ID NO: 1725
  REGION 1..74: note = Synthetic construct

SEQ ID NO: 1728 - protein, 125 aa, synthetic construct
  REGION 1..125: note = Synthetic construct
EVQLVESGGGLVQPGGSLRLSCEVSGLTFTTSEFNWVRQAPGKGLEWLSFGRGSTIYYADSVKGRFTVSRDNAKSSLYLQMSSLRVEDTALYYCTRSEKRITLVRKIKGRWFDPWGQGTLVTVSS

SEQ ID NO: 1729 - protein, 119 aa, synthetic construct
  REGION 1..119: note = Synthetic construct
EVQVVESGGALVQPGGSLRLSCAASGFTFKTSELNWVRQAPGKGLEWLSYYYADSGRGRFTIARDNAKNSLFLQMNSLRVEDTGVYYCARSEKRITMARKIKGRWFDPWGEGILVTVSS

SEQ ID NO: 1730 - protein, 77 aa, synthetic construct
  REGION 1..77: note = Synthetic construct
ISSGSGTIYYADSVRGRFTISRDNAKNSLFLQMNSLRVEDTGVYYCARSEKRITMARKIKGRWFDPWGEGILVTVSS

SEQ ID NO: 1731 - protein, 127 aa, synthetic construct
  REGION 1..127: note = Synthetic construct
EVQVVESGGALVQPGGSLRLSCAASGFTFKTSELNWVRQAPGKGLEWLSYISSGSGTIYYADSVRGRFTISRDNAKNSLFLQMNSLRVEDTGVYYCARSEKRITMARKIKGRWFDPWGEGILVTVSS

SEQ ID NO: 1732 - protein, 127 aa, synthetic construct; identical to SEQ ID NO: 1731
  REGION 1..127: note = Synthetic construct

SEQ ID NO: 1733 - protein, 127 aa, synthetic construct
  REGION 1..127: note = Synthetic construct
EVQVVESGGALVQPGGSLRLSCAASGFTFKTSELNWVRQAPGKGLEWLSYISSGSGTIYYADSVRGRFNISRDNAKNSLFLQMNSLRVEDTGVYYCARSEKRITMARKIKGRWFDPWGEGILVTVSS

SEQ ID NO: 1734 - protein, 127 aa, synthetic construct
  REGION 1..127: note = Synthetic construct
EVQVVESGGALVQPGGSLRLSCAASGFTFKTSELNWVRQAPGKGLEWLSYISSGSGTIYYADSVRGRLTISRDNAKNSLFLQMNSLRVEDTGVYYCARSEKRITMARKIKGRWFDPWGEGILVTVSS

SEQ ID NO: 1735 - protein, 119 aa, synthetic construct
  REGION 1..119: note = Synthetic construct
EVQVVESGGALVQPGGSLRLSCAASGFTFKTSELNWVRQAPGKGLEWLSYYYADSVRGRFTISRDNAKNSLFLQMNSLRVEDTGVYYCARSEKRITMARKIKGRWFDPWGEGILVTVSS

SEQ ID NO: 1736 - protein, 127 aa, synthetic construct
  REGION 1..127: note = Synthetic construct
EVQVVESGGALVQPGGSLRLSCAASGFTFKTSELNWVRQAPGKRLEWLSYISSGSGTIYYADSVRGRFTISRDNAKNSLFLQMNSLRVEDTGVYYCARSEKRITMARKIKGRWFDPWGEGILVTVSS

SEQ ID NO: 1737 - protein, 77 aa, synthetic construct; identical to SEQ ID NO: 1730
  REGION 1..77: note = Synthetic construct

SEQ ID NO: 1738 - protein, 77 aa, synthetic construct; identical to SEQ ID NO: 1730
  REGION 1..77: note = Synthetic construct

SEQ ID NO: 1739 - protein, 127 aa, synthetic construct
  REGION 1..127: note = Synthetic construct
EVQVVESGGALVQPGGSLRLSCAASGFTFKTSELNWVRQAPGKGLEWLSYISSGSGTIYYADSVRGRFTISRDNAKNSLFLQMNGLRVEDTGVYYCARSEKRITMARKIKGRWFDPWGEGILVTVSS

SEQ ID NO: 1740 - protein, 126 aa, synthetic construct
  REGION 1..126: note = Synthetic construct
EVQVVESGGALVQPGGSLRLSCAASGFTFKTSELNWVRQAPGKGLEWLSYISSGSGTIYYADSVRGRFTISRDNAKNSLFLQMNSLRVEDTGVYYCARSEKRITMARKIKGRWFDPWGEGILVTVS

SEQ ID NO: 1741 - protein, 127 aa, synthetic construct
  REGION 1..127: note = Synthetic construct
EVQLVESGGGLVQPGGSLRLSCVVSGLTFSASEFTWVRQAPGQGLEWLSYIGRGSSTIYYVDSVKGRFTVSRDNAKNSLYLQMNSLRVEDTALYYCTRSEKRNTMARKIKGRWFDSWGQGTLVTVAS

SEQ ID NO: 1742 - protein, 69 aa, synthetic construct
  REGION 1..69: note = Synthetic construct
YYADSVKGRFTVSRDNAKNSLYLQMNSLRVEDTALYYCTRSEKRNTMARKIKGRWFDSWGQGTLVTVAS

SEQ ID NO: 1743 - protein, 127 aa, synthetic construct
  REGION 1..127: note = Synthetic construct
EVQLVESGGGLVQPGGSLRLSCVVSGLTFSASEFTWVRQAPGQGLEWLSYIGRGSSTIYYADSVKGRFTVSRDNAKNSLYLQMNSLRVEDTALYYCTRSEKRNTMARKIKGRWFDSWGQGTLVTVAS

SEQ ID NO: 1744 - protein, 127 aa, synthetic construct; identical to SEQ ID NO: 1743
  REGION 1..127: note = Synthetic construct

SEQ ID NO: 1745 - protein, 69 aa, synthetic construct; identical to SEQ ID NO: 1742
  REGION 1..69: note = Synthetic construct

SEQ ID NO: 1746 - protein, 127 aa, synthetic construct
  REGION 1..127: note = Synthetic construct
EVQLVESGGGLVQPGGSLRLSCVVSGLTFSASEFTWVRQAPGQGLEWLSYIGRGSSAIYYADSVKGRFTVSRDNAKNSLYLQMNSLRVEDTALYYCTRSEKRNTMARKIKGRWFDSWGQGTLVTVAS

SEQ ID NO: 1747 - protein, 127 aa, synthetic construct
  REGION 1..127: note = Synthetic construct
EVQLVESGGGLVQPGGSLRLSCVVSGLTFSASEFTWVRQAPGQGLEWLSYIGRGSSTIYYADSVKGRFTVSRDNAKNSLYLQMNGLRVEDTALYYCTRSEKRNTMARKIKGRWFDSWGQGTLVTVAS

SEQ ID NO: 1748 - protein, 127 aa, synthetic construct; identical to SEQ ID NO: 1743
  REGION 1..127: note = Synthetic construct

SEQ ID NO: 1749 - protein, 69 aa, synthetic construct; identical to SEQ ID NO: 1742
  REGION 1..69: note = Synthetic construct

SEQ ID NO: 1750 - protein, 127 aa, synthetic construct
  REGION 1..127: note = Synthetic construct
EVQLVESGGGLVQPGGSLRLSCVVSGLTFSASEFTWVRQAPGQGLEWLSYIGRGSSTIYYADSGKGRFTVSRDNAKNSLYLQMNSLRVEDTALYYCTRSEKRNTMARKIKGRWFDSWGQGTLVTVAS

SEQ ID NO: 1751 - protein, 69 aa, synthetic construct; identical to SEQ ID NO: 1742
  REGION 1..69: note = Synthetic construct

SEQ ID NO: 1752 - protein, 69 aa, synthetic construct; identical to SEQ ID NO: 1742
  REGION 1..69: note = Synthetic construct

SEQ ID NO: 1753 - protein, 69 aa, synthetic construct; identical to SEQ ID NO: 1742
  REGION 1..69: note = Synthetic construct

SEQ ID NO: 1754 - protein, 125 aa, synthetic construct
  REGION 1..125: note = Synthetic construct
EVQLVESGGGLVQPGGSLRLSCEVSGLTFTTSEFNWVRQAPGKGLEWLSFGRGSTIYYADSVKGRFTVSRDNAKSSLYLQMSSLRVEDTALYYCTRSEKRITLALKIKGRWFDPWGQGTLVTVSS

SEQ ID NO: 1755 - protein, 127 aa, synthetic construct
  REGION 1..127: note = Synthetic construct
EVQLVESGGGLVQPGGSLRLSCVVSGLTFSASEFTWVRQAPGQGLEWLSYIGRGSSTIYYADSVKGRFTVSRDNAKNSLYLQMNSLRVEDTALYYCTRSEKRNTMARKIKGRSFDSWGQGTLVTVAS

SEQ ID NO: 1756 - protein, 125 aa, synthetic construct
  REGION 1..125: note = Synthetic construct
EVQLVESGGGLVQPGGSLRLSCAVSGLTFSTSEFTWVRQAPGKGLEWLSHGRGSTLYYADSVKGRFTVSRDNAKNSLYLQLSSLRVEDTALYYCTRSEPRNTLARKIKGRWFDPWGQGTLVTVSS

SEQ ID NO: 1757 - DNA, 16 bp, synthetic construct
  misc_feature 1..16: note = Synthetic construct
  source 1..16: mol_type = other DNA
ctagccttccgaacgc

SEQ ID NO: 1758 - DNA, 16 bp, synthetic construct
  misc_feature 1..16: note = Synthetic construct
  source 1..16: mol_type = other DNA
ggatgtttctccaacc

SEQ ID NO: 1759 - DNA, 16 bp, synthetic construct
  misc_feature 1..16: note = Synthetic construct
  source 1..16: mol_type = other DNA
tcacaagcatccaaca

SEQ ID NO: 1760 - DNA, 16 bp, synthetic construct
  misc_feature 1..16: note = Synthetic construct
  source 1..16: mol_type = other DNA
ttgcgtccaggcagta

SEQ ID NO: 1761 - DNA, 16 bp, synthetic construct
  misc_feature 1..16: note = Synthetic construct
  source 1..16: mol_type = other DNA
ggccgatcatgttccc

SEQ ID NO: 1762 - DNA, 16 bp, synthetic construct
  misc_feature 1..16: note = Synthetic construct
  source 1..16: mol_type = other DNA
acatcagtcggcgcta

SEQ ID NO: 1763 - DNA, 379 bp, synthetic construct
  misc_feature 1..379: note = Synthetic construct
  source 1..379: mol_type = other DNA
gaggtgcagctggaagagtcggggggagacttggtaaagccgggggggtccctcagactctcctgtgtagcctcgggatttactttcgacaccgcctggctgaggtgggtccgccaggctcctgggaaggggctggagtgggttggccaaattcaaagtaaaaatgacggtgggacaatcgactacgccgcgcccgtgaaagacagattcaccatctcacgagatgattcaaaagccacggtgtatctgcaaatgaacaatctgaaaacggaagacacagccatttattattgtgccgctgggctctggtccggggacttatcacggcctcgctactctgactcctggggccggggaaccctggtcaccgtctcctcag

SEQ ID NO: 1764 - DNA, 358 bp, synthetic construct
  misc_feature 1..358: note = Synthetic construct
  source 1..358: mol_type = other DNA
gaggtgcacctggtggagtctgggggaggcttgatacagccgggggggtccctgagactctcctgtgcggcctctggattcagcataagtttttatgccatgtactgggtccgccaggctccagggaaggggctggagtgggtcgcagctttcagtggcagtggtgatcgtttatattatgcagactccgggaggggccggttcaccatctcaaaagacatttccaagaacacgctggagctggaaatgaacttcctgggagccgacgacacggccgtatattactgtgctaagggactaactactgaaagcagactagaattttggggccagggaaccctggtcaccgtctcctcag

SEQ ID NO: 1765 - DNA, 364 bp, synthetic construct
  misc_feature 1..364: note = Synthetic construct
  source 1..364: mol_type = other DNA
gaggtgcagctggtggagtctgggggaggcctggtcaagccgggggggtccctcagactctcctgtgcagcctctggattcaccttcagtggctatagcatgagctgggtccgccaggctccagggaaggggctggagtgggtctcatcaattagtactggtagtactaagattgactacgcagactcagtgaagggccgattcaccatctccagagacaacgccaagaactcactgtttctgcaaatggacagcctgagagccgaggacacggctgtgtattactgtgtgtcgtcctggggtccagaaagtccctactattttgactactggggccagggagcccgggtcaccgtctcctcag

SEQ ID NO: 1766 - DNA, 370 bp, synthetic construct
  misc_feature 1..370: note = Synthetic construct
  source 1..370: mol_type = other DNA
cacgtgcagttggtgcagtctggggctgaggtgaagaagcctggggcctccgtgaaggtctcctgcaaggcctctggataccccttcagcgactatgatatcaactgggtgcgacaggcccctggacagggccttgagtggatggggtggatgaaccctgccagtggtaacacagaatatgcacagaaattccagggcagagccaccattacgagggacacctccgtgagcacagcctacttggagctgagcagcctgacatctgacgacgcggccgtttatttctgtgcgagagaatattgtactggtggtgactgtcacttcttcctcgactactggggccagggaaccctggtcactgtctcctcag

SEQ ID NO: 1767 - DNA, 370 bp, synthetic construct
  misc_feature 1..370: note = Synthetic construct
  source 1..370: mol_type = other DNA
caggtgcgactggagcagtctggggctgaggtgatgaagcctggggcctcagtgaaggtttcctgcagggcatctggatactccttcacccccttctatattctctgggtgcgacaggcccctggacaagggcttgagtggatgggaataatcaaccccagtggtggtggaacaacctacgcacagagtttccagggcagagtcaccatgaccagggacaggtccacgaacacagtctacatggaattgaggagcctgagatctgaggacacggccgtttatttctgcgcgcgggtcgcccccccgggagtggtcaataacaagtggttcgacatctggggccagggaaccctggtcaccgtctcctcag

SEQ ID NO: 1768 - DNA, 379 bp, synthetic construct
  misc_feature 1..379: note = Synthetic construct
  source 1..379: mol_type = other DNA
gagggacaggtggtggagtctgggggaggcttggtgcagcctggagggtccctgagactctcctgtgcagtctctgggctcacctttagtacttctgaattcgcctgggtccgccaggctccagggaaggggctggagtggctctcattcattggtcgcgggtcttccatatactacgcagactctgtgaggggccgattcaccgtctccagagacaacgccaagaactcattgtatctacaaatgaacagcctgagagtcgaggacacggctctttattattgcgcgagatcggaaaagcgagttactatgactcggaaaataaagggacggtggttcggcccctggggccagggaaccctggtcaccgtctcctcag

SEQ ID NO: 1769 - DNA, 57 bp, synthetic construct
  misc_feature 1..57: note = Synthetic construct
  source 1..57: mol_type = other DNA
tgtgccgctgggctctggtccggggacttatcacggcctcgctactctgactcctgg

SEQ ID NO: 1770 - DNA, 42 bp, synthetic construct
  misc_feature 1..42: note = Synthetic construct
  source 1..42: mol_type = other DNA
tgtgctaagggactaactactgaaagcagactagaattttgg

SEQ ID NO: 1771 - DNA, 48 bp, synthetic construct
  misc_feature 1..48: note = Synthetic construct
  source 1..48: mol_type = other DNA
tgtgtgtcgtcctggggtccagaaagtccctactattttgactactgg

SEQ ID NO: 1772 - DNA, 54 bp, synthetic construct
  misc_feature 1..54: note = Synthetic construct
  source 1..54: mol_type = other DNA
tgtgcgagagaatattgtactggtggtgactgtcacttcttcctcgactactgg

SEQ ID NO: 1773 - DNA, 54 bp, synthetic construct
  misc_feature 1..54: note = Synthetic construct
  source 1..54: mol_type = other DNA
tgcgcgcgggtcgcccccccgggagtggtcaataacaagtggttcgacatctgg

SEQ ID NO: 1774 - DNA, 66 bp, synthetic construct
  misc_feature 1..66: note = Synthetic construct
  source 1..66: mol_type = other DNA
tgcgcgagatcggaaaagcgagttactatgactcggaaaataaagggacggtggttcggcccctgg

SEQ ID NO: 1775 - DNA, 75 bp, synthetic construct
  misc_feature 1..75: note = Synthetic construct
  source 1..75: mol_type = other DNA
gaggtgcagctggaagagtcggggggagacttggtaaagccgggggggtccctcagactctcctgtgtagcctcg

SEQ ID NO: 1776 - DNA, 75 bp, synthetic construct
  misc_feature 1..75: note = Synthetic construct
  source 1..75: mol_type = other DNA
gaggtgcacctggtggagtctgggggaggcttgatacagccgggggggtccctgagactctcctgtgcggcctct

SEQ ID NO: 1777 - DNA, 75 bp, synthetic construct
  misc_feature 1..75: note = Synthetic construct
  source 1..75: mol_type = other DNA
gaggtgcagctggtggagtctgggggaggcctggtcaagccgggggggtccctcagactctcctgtgcagcctct

SEQ ID NO: 1778 - DNA, 75 bp, synthetic construct
  misc_feature 1..75: note = Synthetic construct
  source 1..75: mol_type = other DNA
cacgtgcagttggtgcagtctggggctgaggtgaagaagcctggggcctccgtgaaggtctcctgcaaggcctct

SEQ ID NO: 1779 - DNA, 75 bp, synthetic construct
  misc_feature 1..75: note = Synthetic construct
  source 1..75: mol_type = other DNA
caggtgcgactggagcagtctggggctgaggtgatgaagcctggggcctcagtgaaggtttcctgcagggcatct

SEQ ID NO: 1780 - DNA, 75 bp, synthetic construct
  misc_feature 1..75: note = Synthetic construct
  source 1..75: mol_type = other DNA
gagggacaggtggtggagtctgggggaggcttggtgcagcctggagggtccctgagactctcctgtgcagtctct

SEQ ID NO: 1781 - DNA, 51 bp, synthetic construct
  misc_feature 1..51: note = Synthetic construct
  source 1..51: mol_type = other DNA
ctgaggtgggtccgccaggctcctgggaaggggctggagtgggttggccaa

SEQ ID NO: 1782 - DNA, 51 bp, synthetic construct
  misc_feature 1..51: note = Synthetic construct
  source 1..51: mol_type = other DNA
atgtactgggtccgccaggctccagggaaggggctggagtgggtcgcagct

SEQ ID NO: 1783 - DNA, 51 bp, synthetic construct
  misc_feature 1..51: note = Synthetic construct
  source 1..51: mol_type = other DNA
atgagctgggtccgccaggctccagggaaggggctggagtgggtctcatca

SEQ ID NO: 1784 - DNA, 51 bp, synthetic construct
  misc_feature 1..51: note = Synthetic construct
  source 1..51: mol_type = other DNA
atcaactgggtgcgacaggcccctggacagggccttgagtggatggggtgg

SEQ ID NO: 1785 - DNA, 51 bp, synthetic construct
  misc_feature 1..51: note = Synthetic construct
  source 1..51: mol_type = other DNA
attctctgggtgcgacaggcccctggacaagggcttgagtggatgggaata

SEQ ID NO: 1786 - DNA, 51 bp, synthetic construct
  misc_feature 1..51: note = Synthetic construct
  source 1..51: mol_type = other DNA
ttcgcctgggtccgccaggctccagggaaggggctggagtggctctcattc

SEQ ID NO: 1787 - DNA, 114 bp, synthetic construct
  misc_feature 1..114: note = Synthetic construct
  source 1..114: mol_type = other DNA
gactacgccgcgcccgtgaaagacagattcaccatctcacgagatgattcaaaagccacggtgtatctgcaaatgaacaatctgaaaacggaagacacagccatttattattgt

SEQ ID NO: 1788 - DNA, 114 bp, synthetic construct
  misc_feature 1..114: note = Synthetic construct
  source 1..114: mol_type = other DNA
tattatgcagactccgggaggggccggttcaccatctcaaaagacatttccaagaacacgctggagctggaaatgaacttcctgggagccgacgacacggccgtatattactgt

SEQ ID NO: 1789 - DNA, 114 bp, synthetic construct
  misc_feature 1..114: note = Synthetic construct
  source 1..114: mol_type = other DNA
gactacgcagactcagtgaagggccgattcaccatctccagagacaacgccaagaactcactgtttctgcaaatggacagcctgagagccgaggacacggctgtgtattactgt

SEQ ID NO: 1790 - DNA, 114 bp, synthetic construct
  misc_feature 1..114: note = Synthetic construct
  source 1..114: mol_type = other DNA
gaatatgcacagaaattccagggcagagccaccattacgagggacacctccgtgagcacagcctacttggagctgagcagcctgacatctgacgacgcggccgtttatttctgt

SEQ ID NO: 1791 - DNA, 114 bp, synthetic construct
  misc_feature 1..114: note = Synthetic construct
  source 1..114: mol_type = other DNA
acctacgcacagagtttccagggcagagtcaccatgaccagggacaggtccacgaacacagtctacatggaattgaggagcctgagatctgaggacacggccgtttatttctgc

SEQ ID NO: 1792 - DNA, 114 bp, synthetic construct
  misc_feature 1..114: note = Synthetic construct
  source 1..114: mol_type = other DNA
tactacgcagactctgtgaggggccgattcaccgtctccagagacaacgccaagaactcattgtatctacaaatgaacagcctgagagtcgaggacacggctctttattattgc

SEQ ID NO: 1793 - DNA, 34 bp, synthetic construct
  misc_feature 1..34: note = Synthetic construct
  source 1..34: mol_type = other DNA
tggggccggggaaccctggtcaccgtctcctcag

SEQ ID NO: 1794 - DNA, 34 bp, synthetic construct
  misc_feature 1..34: note = Synthetic construct
  source 1..34: mol_type = other DNA
tggggccagggaaccctggtcaccgtctcctcag

SEQ ID NO: 1795 - DNA, 34 bp, synthetic construct
  misc_feature 1..34: note = Synthetic construct
  source 1..34: mol_type = other DNA
tggggccagggagcccgggtcaccgtctcctcag

SEQ ID NO: 1796 - DNA, 34 bp, synthetic construct
  misc_feature 1..34: note = Synthetic construct
  source 1..34: mol_type = other DNA
tggggccagggaaccctggtcactgtctcctcag

SEQ ID NO: 1797 - DNA, 34 bp, synthetic construct; identical to SEQ ID NO: 1794
  misc_feature 1..34: note = Synthetic construct
  source 1..34: mol_type = other DNA

SEQ ID NO: 1798 - DNA, 34 bp, synthetic construct; identical to SEQ ID NO: 1794
  misc_feature 1..34: note = Synthetic construct
  source 1..34: mol_type = other DNA

SEQ ID NO: 1799 - DNA, 24 bp, synthetic construct
  misc_feature 1..24: note = Synthetic construct
  source 1..24: mol_type = other DNA
ggatttactttcgacaccgcctgg

SEQ ID NO: 1800 - DNA, 24 bp, synthetic construct
  misc_feature 1..24: note = Synthetic construct
  source 1..24: mol_type = other DNA
ggattcagcataagtttttatgcc

SEQ ID NO: 1801 - DNA, 24 bp, synthetic construct
  misc_feature 1..24: note = Synthetic construct
  source 1..24: mol_type = other DNA
ggattcaccttcagtggctatagc

SEQ ID NO: 1802 - DNA, 24 bp, synthetic construct
  misc_feature 1..24: note = Synthetic construct
  source 1..24: mol_type = other DNA
ggataccccttcagcgactatgat

SEQ ID NO: 1803 - DNA, 24 bp, synthetic construct
  misc_feature 1..24: note = Synthetic construct
  source 1..24: mol_type = other DNA
ggatactccttcacccccttctat

SEQ ID NO: 1804 - DNA, 24 bp, synthetic construct
  misc_feature 1..24: note = Synthetic construct
  source 1..24: mol_type = other DNA
gggctcacctttagtacttctgaa

SEQ ID NO: 1805 - DNA, 30 bp, synthetic construct
  misc_feature 1..30: note = Synthetic construct
  source 1..30: mol_type = other DNA
attcaaagtaaaaatgacggtgggacaatc

SEQ ID NO: 1806 - DNA, 24 bp, synthetic construct
  misc_feature 1..24: note = Synthetic construct
  source 1..24: mol_type = other DNA
ttcagtggcagtggtgatcgttta

SEQ ID NO: 1807 - DNA, 24 bp, synthetic construct
  misc_feature 1..24: note = Synthetic construct
  source 1..24: mol_type = other DNA
attagtactggtagtactaagatt

SEQ ID NO: 1808 - DNA, 24 bp, synthetic construct
  misc_feature 1..24: note = Synthetic construct
  source 1..24: mol_type = other DNA
atgaaccctgccagtggtaacaca

SEQ ID NO: 1809 - DNA, 24 bp, synthetic construct
  misc_feature 1..24: note = Synthetic construct
  source 1..24: mol_type = other DNA
atcaaccccagtggtggtggaaca

SEQ ID NO: 1810 - DNA, 21 bp, synthetic construct
  misc_feature 1..21: note = Synthetic construct
  source 1..21: mol_type = other DNA
attggtcgcgggtcttccata

SEQ ID NO: 1811 - DNA, 51 bp, synthetic construct
  misc_feature 1..51: note = Synthetic construct
  source 1..51: mol_type = other DNA
gccgctgggctctggtccggggacttatcacggcctcgctactctgactcc

SEQ ID NO: 1812 - DNA, 36 bp, synthetic construct
  misc_feature 1..36: note = Synthetic construct
  source 1..36: mol_type = other DNA
gctaagggactaactactgaaagcagactagaattt

SEQ ID NO: 1813 - DNA, 42 bp, synthetic construct
  misc_feature 1..42: note = Synthetic construct
  source 1..42: mol_type = other DNA
gtgtcgtcctggggtccagaaagtccctactattttgactac

SEQ ID NO: 1814 - DNA, 48 bp, synthetic construct
  misc_feature 1..48: note = Synthetic construct
  source 1..48: mol_type = other DNA
gcgagagaatattgtactggtggtgactgtcacttcttcctcgactac

SEQ ID NO: 1815 - DNA, 48 bp, synthetic construct
  misc_feature 1..48: note = Synthetic construct
  source 1..48: mol_type = other DNA
gcgcgggtcgcccccccgggagtggtcaataacaagtggttcgacatc

SEQ ID NO: 1816 - DNA, 60 bp, synthetic construct
  misc_feature 1..60: note = Synthetic construct
  source 1..60: mol_type = other DNA
gcgagatcggaaaagcgagttactatgactcggaaaataaagggacggtggttcggcccc

SEQ ID NO: 1817 - protein, 19 aa, synthetic construct
  REGION 1..19: note = Synthetic construct
CAAGLWSGDLSRPRYSDSW

SEQ ID NO: 1818 - protein, 14 aa, synthetic construct
  REGION 1..14: note = Synthetic construct
CAKGLTTESRLEFW

SEQ ID NO: 1819 - protein, 16 aa, synthetic construct
  REGION 1..16: note = Synthetic construct
CVSSWGPESPYYFDYW

SEQ ID NO: 1820 - protein, 18 aa, synthetic construct
  REGION 1..18: note = Synthetic construct
CAREYCTGGDCHFFLDYW

SEQ ID NO: 1821 - protein, 18 aa, synthetic construct
  REGION 1..18: note = Synthetic construct
CARVAPPGVVNNKWFDIW

SEQ ID NO: 1822 - protein, 22 aa, synthetic construct
  REGION 1..22: note = Synthetic construct
CARSEKRVTMTRKIKGRWFGPW

SEQ ID NO: 1823 - DNA, 57 bp, synthetic construct; identical to SEQ ID NO: 1769
  misc_feature 1..57: note = Synthetic construct
  source 1..57: mol_type = other DNA

SEQ ID NO: 1824 - DNA, 42 bp, synthetic construct; identical to SEQ ID NO: 1770
  misc_feature 1..42: note = Synthetic construct
  source 1..42: mol_type = other DNA

SEQ ID NO: 1825 - DNA, 48 bp, synthetic construct; identical to SEQ ID NO: 1771
  misc_feature 1..48: note = Synthetic construct
  source 1..48: mol_type = other DNA

SEQ ID NO: 1826 - DNA, 54 bp, synthetic construct; identical to SEQ ID NO: 1772
  misc_feature 1..54: note = Synthetic construct
  source 1..54: mol_type = other DNA

SEQ ID NO: 1827 - DNA, 54 bp, synthetic construct; identical to SEQ ID NO: 1773
  misc_feature 1..54: note = Synthetic construct
  source 1..54: mol_type = other DNA

SEQ ID NO: 1828 - DNA, 66 bp, synthetic construct; identical to SEQ ID NO: 1774
  misc_feature 1..66: note = Synthetic construct
  source 1..66: mol_type = other DNA

SEQ ID NO: 1829 - DNA, 337 bp, synthetic construct
  misc_feature 1..337: note = Synthetic construct
  source 1..337: mol_type = other DNA
gatattgtgctgactcagtctccactctccctgtccgtcacccctggagagccggcctccatctcctgcaggtctaatcagagcctcctccataataatggatacaactttttggattggtacctgcagaagccagggcagtctccacagctcctgatctatttggcttcttctcgggcctccggggtccctgacaggttcagtggcagtggatcaggcacagattttacactgagaatcagcagagtggaggctgaggatgttggggtctattactgcatgcaacctctacagctcccagacactttcggcggagggaccaaggtggagatcaaac

SEQ ID NO: 1830 - DNA, 319 bp, synthetic construct
  misc_feature 1..319: note = Synthetic construct
  source 1..319: mol_type = other DNA
gacatccagatgacccagtctccatcctccctgtctgcatctgtcggagacagagtcaccatcacctgccgggcaagtcaatacattggcagttttttaaattggtatcagcaacaacccggaaaaccccctaaactcctcatctatgctgcgtccactttgcaatctggggcccccctgagattcagtgccagtgagtccgggtcagatttcactctcaccatcaccaatctgcagcctgaagactttgccacttattactgtcaacagagttacaatgtcccgacgttcggccaggggaccaaggtggagatcaagc

SEQ ID NO: 1831 - DNA, 322 bp, synthetic construct
  misc_feature 1..322: note = Synthetic construct
  source 1..322: mol_type = other DNA
gaagttgtgctgactcagtctccagactttcagtctgtgactccaaaggagaaagtcaccatcatctgccgggccagtcagagcattggtagttacttacactggtaccagcagaaaccacatcagtctccaaaactcctcatcaaatatgcttcccagtccatctcaggggtcccctcgaggttcagtggcagtggctctgggacagaattcaccctcaccatcaagagcctggaagctgaagatgctgcaacgtattactgtcatcagagtagtagtttacctttcactttcggccctgggacgaaagtggatatcaaac

SEQ ID NO: 1832 - DNA, 340 bp, synthetic construct
  misc_feature 1..340: note = Synthetic construct
  source 1..340: mol_type = other DNA
gacatcgtgatgacccagtctccagactccctgcctgtgtctctgggcgagagggccaccatcaactgcaagtccagtcagagtgttttatacacccccaacaacaagaattacttagcttggtatcagcagaagccaggacagcctccgaagctgctcatttactgggcatctatccgtcaatccggggtccctgagcgattcagtggcagcgggtcagggacagatttcactctcaccatcagcagcctgcaggctgaggatgtggcggtttattattgtcaacatttttatagtagtcctccgactttcggccgtgggaccactgtggcgatcaaac

SEQ ID NO: 1833 - DNA, 331 bp, synthetic construct
  misc_feature 1..331: note = Synthetic construct
  source 1..331: mol_type = other DNA
cagtctgccctgactcagccgcgctcagtgtccgggtctcctggacagtcagtcaccatctcctgcactggaaccagcacttatgtcgatgcttttacctatgtctcctggtaccagcaacacccaggcagagcccccaaagtcttgatttatgatgtcaataagcggccctcaggggtccctgatcgcttctctggctccaagtctggcagtacgacctccctgaccatctctgatctccacattgaagatgaggctgattattactgctgcttgtatgcaggatcctacagttgggtcttcggcggagggaccaagctgaccgtcctgg

SEQ ID NO: 1834 - DNA, 325 bp, synthetic construct
  misc_feature 1..325: note = Synthetic construct
  source 1..325: mol_type = other DNA
tcctatgtgctgactcagccaccctcggtgtcagtggccccagggcagacggccaggattacttgtgggggagactactttgaagttaaaagtgttcactggtaccagcagaagccaggccaggcccctgtattggtcgcctttgatgataccgaccggccctcagggatccctgaccgattctctggctccacctctgggaacacggccaccctgacaatcagtagggtcgaagtcggggatgaggccgactattattgtcaggtgtgggatagtagtagtgaacatgtggtcttcggcggagggagcaagttgaccgtcctag

SEQ ID NO: 1835 - DNA, 33 bp, synthetic construct
  misc_feature 1..33: note = Synthetic construct
  source 1..33: mol_type = other DNA
tgcatgcaacctctacagctcccagacactttc

SEQ ID NO: 1836 - DNA, 30 bp, synthetic construct
  misc_feature 1..30: note = Synthetic construct
  source 1..30: mol_type = other DNA
tgtcaacagagttacaatgtcccgacgttc

SEQ ID NO: 1837 - DNA, 33 bp, synthetic construct
  misc_feature 1..33: note = Synthetic construct
  source 1..33: mol_type = other DNA
tgtcatcagagtagtagtttacctttcactttc

SEQ ID NO: 1838 - DNA, 33 bp, synthetic construct
  misc_feature 1..33: note = Synthetic construct
  source 1..33: mol_type = other DNA
tgtcaacatttttatagtagtcctccgactttc

SEQ ID NO: 1839 - DNA, 36 bp, synthetic construct
  misc_feature 1..36: note = Synthetic construct
  source 1..36: mol_type = other DNA
tgctgcttgtatgcaggatcctacagttgggtcttc

SEQ ID NO: 1840 - DNA, 39 bp, synthetic construct
  misc_feature 1..39: note = Synthetic construct
  source 1..39: mol_type = other DNA
tgtcaggtgtgggatagtagtagtgaacatgtggtcttc

SEQ ID NO: 1841 - DNA, 78 bp, synthetic construct
  misc_feature 1..78: note = Synthetic construct
  source 1..78: mol_type = other DNA
gatattgtgctgactcagtctccactctccctgtccgtcacccctggagagccggcctccatctcctgcaggtctaat

SEQ ID NO: 1842 - DNA, 78 bp, synthetic construct
  misc_feature 1..78: note = Synthetic construct
  source 1..78: mol_type = other DNA
gacatccagatgacccagtctccatcctccctgtctgcatctgtcggagacagagtcaccatcacctgccgggcaagt

SEQ ID NO: 1843 - DNA, 78 bp, synthetic construct
  misc_feature 1..78: note = Synthetic construct
  source 1..78: mol_type = other DNA
gaagttgtgctgactcagtctccagactttcagtctgtgactccaaaggagaaagtcaccatcatctgccgggccagt

SEQ ID NO: 1844 - DNA, 78 bp, synthetic construct
  misc_feature 1..78: note = Synthetic construct
  source 1..78: mol_type = other DNA
gacatcgtgatgacccagtctccagactccctgcctgtgtctctgggcgagagggccaccatcaactgcaagtccagt

SEQ ID NO: 1845 - DNA, 75 bp, synthetic construct
  misc_feature 1..75: note = Synthetic construct
  source 1..75: mol_type = other DNA
cagtctgccctgactcagccgcgctcagtgtccgggtctcctggacagtcagtcaccatctcctgcactggaacc

SEQ ID NO: 1846 - DNA, 75 bp, synthetic construct
  misc_feature 1..75: note = Synthetic construct
  source 1..75: mol_type = other DNA
tcctatgtgctgactcagccaccctcggtgtcagtggccccagggcagacggccaggattacttgtgggggagac

SEQ ID NO: 1847 - DNA, 51 bp, synthetic construct
  misc_feature 1..51: note = Synthetic construct
  source 1..51: mol_type = other DNA
ttggattggtacctgcagaagccagggcagtctccacagctcctgatctat

SEQ ID NO: 1848 - DNA, 51 bp, synthetic construct
  misc_feature 1..51: note = Synthetic construct
  source 1..51: mol_type = other DNA
ttaaattggtatcagcaacaacccggaaaaccccctaaactcctcatctat

SEQ ID NO: 1849 - DNA, 51 bp, synthetic construct
  misc_feature 1..51: note = Synthetic construct
  source 1..51: mol_type = other DNA
ttacactggtaccagcagaaaccacatcagtctccaaaactcctcatcaaa

SEQ ID NO: 1850 - DNA, 51 bp, synthetic construct
  misc_feature 1..51: note = Synthetic construct
  source 1..51: mol_type = other DNA
ttagcttggtatcagcagaagccaggacagcctccgaagctgctcatttac

SEQ ID NO: 1851 - DNA, 51 bp, synthetic construct
  misc_feature 1..51: note = Synthetic construct
  source 1..51: mol_type = other DNA
gtctcctggtaccagcaacacccaggcagagcccccaaagtcttgatttat

SEQ ID NO: 1852 - DNA, 51 bp, synthetic construct
  misc_feature 1..51: note = Synthetic construct
  source 1..51: mol_type = other DNA
gttcactggtaccagcagaagccaggccaggcccctgtattggtcgccttt

SEQ ID NO: 1853 - DNA, 108 bp, synthetic construct
  misc_feature 1..108: note = Synthetic construct
  source 1..108: mol_type = other DNA
tctcgggcctccggggtccctgacaggttcagtggcagtggatcaggcacagattttacactgagaatcagcagagtggaggctgaggatgttggggtctattactgc

SEQ ID NO: 1854 - DNA, 108 bp, synthetic construct
  misc_feature 1..108: note = Synthetic construct
  source 1..108: mol_type = other DNA
actttgcaatctggggcccccctgagattcagtgccagtgagtccgggtcagatttcactctcaccatcaccaatctgcagcctgaagactttgccacttattactgt

SEQ ID NO: 1855 - DNA, 108 bp, synthetic construct
  misc_feature 1..108: note = Synthetic construct
  source 1..108: mol_type = other DNA
cagtccatctcaggggtcccctcgaggttcagtggcagtggctctgggacagaattcaccctcaccatcaagagcctggaagctgaagatgctgcaacgtattactgt

SEQ ID NO: 1856 - DNA, 108 bp, synthetic construct
  misc_feature 1..108: note = Synthetic construct
  source 1..108: mol_type = other DNA
atccgtcaatccggggtccctgagcgattcagtggcagcgggtcagggacagatttcactctcaccatcagcagcctgcaggctgaggatgtggcggtttattattgt

SEQ ID NO: 1857 - DNA, 108 bp, synthetic construct
  misc_feature 1..108: note = Synthetic construct
  source 1..108: mol_type = other DNA
aagcggccctcaggggtccctgatcgcttctctggctccaagtctggcagtacgacctccctgaccatctctgatctccacattgaagatgaggctgattattactgc

SEQ ID NO: 1858 - DNA, 108 bp, synthetic construct
  misc_feature 1..108: note = Synthetic construct
  source 1..108: mol_type = other DNA
gaccggccctcagggatccctgaccgattctctggctccacctctgggaacacggccaccctgacaatcagtagggtcgaagtcggggatgaggccgactattattgt

SEQ ID NO: 1859 - DNA, 31 bp, synthetic construct
  misc_feature 1..31: note = Synthetic construct
  source 1..31: mol_type = other DNA
ttcggcggagggaccaaggtggagatcaaac

SEQ ID NO: 1860 - DNA, 31 bp, synthetic construct
  misc_feature 1..31: note = Synthetic construct
  source 1..31: mol_type = other DNA
ttcggccaggggaccaaggtggagatcaagc

SEQ ID NO: 1861 - DNA, 31 bp, synthetic construct
  misc_feature 1..31: note = Synthetic construct
  source 1..31: mol_type = other DNA
ttcggccctgggacgaaagtggatatcaaac

SEQ ID NO: 1862 - DNA, 31 bp, synthetic construct
  misc_feature 1..31: note = Synthetic construct
  source 1..31: mol_type = other DNA
ttcggccgtgggaccactgtggcgatcaaac

SEQ ID NO: 1863 - DNA, 31 bp, synthetic construct
  misc_feature 1..31: note = Synthetic construct
  source 1..31: mol_type = other DNA
ttcggcggagggaccaagctgaccgtcctgg

SEQ ID NO: 1864 - DNA, 31 bp, synthetic construct
  misc_feature 1..31: note = Synthetic construct
  source 1..31: mol_type = other DNA
ttcggcggagggagcaagttgaccgtcctag

SEQ ID NO: 1865 - DNA, 33 bp, synthetic construct
  misc_feature 1..33: note = Synthetic construct
  source 1..33: mol_type = other DNA
cagagcctcctccataataatggatacaacttt

SEQ ID NO: 1866 - DNA, 18 bp, synthetic construct
  misc_feature 1..18: note = Synthetic construct
  source 1..18: mol_type = other DNA
caatacattggcagtttt

SEQ ID NO: 1867 - DNA, 18 bp, synthetic construct
  misc_feature 1..18: note = Synthetic construct
  source 1..18: mol_type = other DNA
cagagcattggtagttac

SEQ ID NO: 1868 - DNA, 36 bp, synthetic construct
  misc_feature 1..36: note = Synthetic construct
  source 1..36: mol_type = other DNA
cagagtgttttatacacccccaacaacaagaattac

SEQ ID NO: 1869 - DNA, 27 bp, synthetic construct
  misc_feature 1..27: note = Synthetic construct
  source 1..27: mol_type = other DNA
agcacttatgtcgatgcttttacctat

SEQ ID NO: 1870 - DNA, 18 bp, synthetic construct
  misc_feature 1..18: note = Synthetic construct
  source 1..18: mol_type = other DNA
tactttgaagttaaaagt

SEQ ID NO: 1871-1876 - skipped (6 entries)

SEQ ID NO: 1877 - DNA, 27 bp, synthetic construct
  misc_feature 1..27: note = Synthetic construct
  source 1..27: mol_type = other DNA
atgcaacctctacagctcccagacact

SEQ ID NO: 1878 - DNA, 24 bp, synthetic construct
  misc_feature 1..24: note = Synthetic construct
  source 1..24: mol_type = other DNA
caacagagttacaatgtcccgacg

SEQ ID NO: 1879 - DNA, 27 bp, synthetic construct
  misc_feature 1..27: note = Synthetic construct
  source 1..27: mol_type = other DNA
catcagagtagtagtttacctttcact

SEQ ID NO: 1880 - DNA, 27 bp, synthetic construct
  misc_feature 1..27: note = Synthetic construct
  source 1..27: mol_type = other DNA
caacatttttatagtagtcctccgact

SEQ ID NO: 1881 - DNA, 30 bp, synthetic construct
  misc_feature 1..30: note = Synthetic construct
  source 1..30: mol_type = other DNA
tgcttgtatgcaggatcctacagttgggtc

SEQ ID NO: 1882 - DNA, 33 bp, synthetic construct
  misc_feature 1..33: note = Synthetic construct
  source 1..33: mol_type = other DNA
caggtgtgggatagtagtagtgaacatgtggtc

SEQ ID NO: 1883 - protein, 11 aa, synthetic construct
  REGION 1..11: note = Synthetic construct
CMQPLQLPDTF

SEQ ID NO: 1884 - protein, 10 aa, synthetic construct
  REGION 1..10: note = Synthetic construct
CQQSYNVPTF

SEQ ID NO: 1885 - protein, 11 aa, synthetic construct [sequence omitted]

SEQ ID NO: 1886 - protein, 11 aa, synthetic construct
  REGION 1..11: note = Synthetic construct
CQHFYSSPPTF

SEQ ID NO: 1887 - protein, 12 aa, synthetic construct
  REGION 1..12: note = Synthetic construct
CCLYAGSYSWVF

SEQ ID NO: 1888 - protein, 13 aa, synthetic construct [sequence omitted]

SEQ ID NO: 1889 - DNA, 33 bp, synthetic construct; identical to SEQ ID NO: 1835
  misc_feature 1..33: note = Synthetic construct
  source 1..33: mol_type = other DNA

SEQ ID NO: 1890 - DNA, 30 bp, synthetic construct; identical to SEQ ID NO: 1836
  misc_feature 1..30: note = Synthetic construct
  source 1..30: mol_type = other DNA

SEQ ID NO: 1891 - DNA, 33 bp, synthetic construct; identical to SEQ ID NO: 1837
  misc_feature 1..33: note = Synthetic construct
  source 1..33: mol_type = other DNA

SEQ ID NO: 1892 - DNA, 33 bp, synthetic construct; identical to SEQ ID NO: 1838
  misc_feature 1..33: note = Synthetic construct
  source 1..33: mol_type = other DNA

SEQ ID NO: 1893 - DNA, 36 bp, synthetic construct; identical to SEQ ID NO: 1839
  misc_feature 1..36: note = Synthetic construct
  source 1..36: mol_type = other DNA

SEQ ID NO: 1894 - DNA, 39 bp, synthetic construct; identical to SEQ ID NO: 1840
  misc_feature 1..39: note = Synthetic construct
  source 1..39: mol_type = other DNA

SEQ ID NO: 1895 - protein, 126 aa, synthetic construct
  REGION 1..126: note = Synthetic construct
EVQLEESGGDLVKPGGSLRLSCVASGFTFDTAWLRWVRQAPGKGLEWVGQIQSKNDGGTIDYAAPVKDRFTISRDDSKATVYLQMNNLKTEDTAIYYCAAGLWSGDLSRPRYSDSWGRGTLVTVSS

SEQ ID NO: 1896 - protein, 119 aa, synthetic construct
  REGION 1..119: note = Synthetic construct
EVHLVESGGGLIQPGGSLRLSCAASGFSISFYAMYWVRQAPGKGLEWVAAFSGSGDRLYYADSGRGRFTISKDISKNTLELEMNFLGADDTAVYYCAKGLTTESRLEFWGQGTLVTVSS

SEQ ID NO: 1897 - protein, 121 aa, synthetic construct
  REGION 1..121: note = Synthetic construct
EVQLVESGGGLVKPGGSLRLSCAASGFTFSGYSMSWVRQAPGKGLEWVSSISTGSTKIDYADSVKGRFTISRDNAKNSLFLQMDSLRAEDTAVYYCVSSWGPESPYYFDYWGQGARVTVSS

SEQ ID NO: 1898 - protein, 123 aa, synthetic construct
  REGION 1..123: note = Synthetic construct
HVQLVQSGAEVKKPGASVKVSCKASGYPFSDYDINWVRQAPGQGLEWMGWMNPASGNTEYAQKFQGRATITRDTSVSTAYLELSSLTSDDAAVYFCAREYCTGGDCHFFLDYWGQGTLVTVSS

SEQ ID NO: 1899 - protein, 112 aa, synthetic construct; identical to SEQ ID NO: 119
  REGION 1..112: note = Synthetic construct

SEQ ID NO: 1900 - protein, 106 aa, synthetic construct
  REGION 1..106: note = Synthetic construct
DIQMTQSPSSLSASVGDRVTITCRASQYIGSFLNWYQQQPGKPPKLLIYAASTLQSGAPLRFSASESGSDFTLTITNLQPEDFATYYCQQSYNVPTFGQGTKVEIK

SEQ ID NO: 1901 - protein, 107 aa, synthetic construct; identical to SEQ ID NO: 242
  REGION 1..107: note = Synthetic construct

SEQ ID NO: 1902 - protein, 113 aa, synthetic construct
  REGION 1..113: note = Synthetic construct
DIVMTQSPDSLPVSLGERATINCKSSQSVLYTPNNKNYLAWYQQKPGQPPKLLIYWASIRQSGVPERFSGSGSGTDFTLTISSLQAEDVAVYYCQHFYSSPPTFGRGTTVAIK

SEQ ID NO: 1903 - protein, 110 aa, synthetic construct
  REGION 1..110: note = Synthetic construct
QSALTQPRSVSGSPGQSVTISCTGTSTYVDAFTYVSWYQQHPGRAPKVLIYDVNKRPSGVPDRFSGSKSGSTTSLTISDLHIEDEADYYCCLYAGSYSWVFGGGTKLTVL

SEQ ID NO: 1904 - protein, 108 aa, synthetic construct; identical to SEQ ID NO: 1406
  REGION 1..108: note = Synthetic construct

SEQ ID NO: 1905 - DNA, 16 bp, synthetic construct
  misc_feature 1..16: note = Synthetic construct
  source 1..16: mol_type = other DNA
ataagagtcggaggta

SEQ ID NO: 1906 - DNA, 16 bp, synthetic construct
  misc_feature 1..16: note = Synthetic construct
  source 1..16: mol_type = other DNA
cttggctagctgaaat

SEQ ID NO: 1907 - DNA, 16 bp, synthetic construct
  misc_feature 1..16: note = Synthetic construct
  source 1..16: mol_type = other DNA
tagccggtcacaggcc

SEQ ID NO: 1908 - DNA, 16 bp, synthetic construct
  misc_feature 1..16: note = Synthetic construct
  source 1..16: mol_type = other DNA
agtctttagtaggtgc

SEQ ID NO: 1909 - DNA, 16 bp, synthetic construct
  misc_feature 1..16: note = Synthetic construct
  source 1..16: mol_type = other DNA
gtcctcacagagtgtg

SEQ ID NO: 1910 - DNA, 16 bp, synthetic construct
  misc_feature 1..16: note = Synthetic construct
  source 1..16: mol_type = other DNA
cgttagaagcgatgac

SEQ ID NO: 1911 - DNA, 16 bp, synthetic construct
  misc_feature 1..16: note = Synthetic construct
  source 1..16: mol_type = other DNA
aatccagagtggtccc

SEQ ID NO: 1912 - DNA, 16 bp, synthetic construct
  misc_feature 1..16: note = Synthetic construct
  source 1..16: mol_type = other DNA
tcaggtagtaacgacg

SEQ ID NO: 1913 - DNA, 16 bp, synthetic construct
  misc_feature 1..16: note = Synthetic construct
  source 1..16: mol_type = other DNA
ccatgtcgttctgttt

SEQ ID NO: 1914 - DNA, 16 bp, synthetic construct
  misc_feature 1..16: note = Synthetic construct
  source 1..16: mol_type = other DNA
cacaaactcaaggtaa

SEQ ID NO: 1915 - DNA, 16 bp, synthetic construct
  misc_feature 1..16: note = Synthetic construct
  source 1..16: mol_type = other DNA
tgtattcgtctctctg

SEQ ID NO: 1916 - DNA, 16 bp, synthetic construct
  misc_feature 1..16: note = Synthetic construct
  source 1..16: mol_type = other DNA
ctgatagagcctatgt

SEQ ID NO: 1917 - DNA, 16 bp, synthetic construct
  misc_feature 1..16: note = Synthetic construct
  source 1..16: mol_type = other DNA
cgtgagcgtggaaaga

SEQ ID NO: 1918 - DNA, 16 bp, synthetic construct
  misc_feature 1..16: note = Synthetic construct
  source 1..16: mol_type = other DNA
tcaacgacaagttaag

SEQ ID NO: 1919 - DNA, 16 bp, synthetic construct
  misc_feature 1..16: note = Synthetic construct
  source 1..16: mol_type = other DNA
cccatacagcgaaggg

SEQ ID NO: 1920 - DNA, 16 bp, synthetic construct
  misc_feature 1..16: note = Synthetic construct
  source 1..16: mol_type = other DNA
cgtgagcgttatgcgt

SEQ ID NO: 1921 - DNA, 16 bp, synthetic construct
  misc_feature 1..16: note = Synthetic construct
  source 1..16: mol_type = other DNA
gcctctagtgccttgg

SEQ ID NO: 1922 - DNA, 16 bp, synthetic construct
  misc_feature 1..16: note = Synthetic construct
  source 1..16: mol_type = other DNA
tcttcggcacagcgtc

SEQ ID NO: 1923 - DNA, 16 bp, synthetic construct
  misc_feature 1..16: note = Synthetic construct
  source 1..16: mol_type = other DNA
cgtgtaacatcagtca

SEQ ID NO: 1924 - DNA, 16 bp, synthetic construct
  misc_feature 1..16: note = Synthetic construct
  source 1..16: mol_type = other DNA
atagacccattacgac

SEQ ID NO: 1925 - DNA, 16 bp, synthetic construct
  misc_feature 1..16: note = Synthetic construct
  source 1..16: mol_type = other DNA
ccttacggtggtgtag

SEQ ID NO: 1926 - DNA, 16 bp, synthetic construct
  misc_feature 1..16: note = Synthetic construct
  source 1..16: mol_type = other DNA
attggacgtagaggaa

SEQ ID NO: 1927 - DNA, 16 bp, synthetic construct
  misc_feature 1..16: note = Synthetic construct
  source 1..16: mol_type = other DNA
agattgcagagtcggt

SEQ ID NO: 1928 - DNA, 16 bp, synthetic construct
  misc_feature 1..16: note = Synthetic construct
  source 1..16: mol_type = other DNA
gaaatgatcttgggta

SEQ ID NO: 1929 - DNA, 16 bp, synthetic construct
  misc_feature 1..16: note = Synthetic construct
  source 1..16: mol_type = other DNA
cgctggatcgcggatc

SEQ ID NO: 1930 - DNA, 16 bp, synthetic construct
  misc_feature 1..16: note = Synthetic construct
  source 1..16: mol_type = other DNA
cattcgctccgttgct

SEQ ID NO: 1931 - DNA, 16 bp, synthetic construct
  misc_feature 1..16: note = Synthetic construct
  source 1..16: mol_type = other DNA
gagcagacatcgtcgg

SEQ ID NO: 1932 - DNA, 16 bp, synthetic construct
  misc_feature 1..16: note = Synthetic construct
  source 1..16: mol_type = other DNA
aaatgccgtcgaatct

SEQ ID NO: 1933 - DNA, 16 bp, synthetic construct
  misc_feature 1..16: note = Synthetic construct
  source 1..16: mol_type = other DNA
catattcaggagttta

SEQ ID NO: 1934 - DNA, 16 bp, synthetic construct
  misc_feature 1..16: note = Synthetic construct
  source 1..16: mol_type = other DNA
atgtgtgtccatgagt

SEQ ID NO: 1935 - DNA, 16 bp, synthetic construct
  misc_feature 1..16: note = Synthetic construct
  source 1..16: mol_type = other DNA
aacgttgtctgaaaga

SEQ ID NO: 1936 - DNA, 16 bp, synthetic construct
  misc_feature 1..16: note = Synthetic construct
  source 1..16: mol_type = other DNA
ataagagcacgaaata

SEQ ID NO: 1937 - DNA, 16 bp, synthetic construct
  misc_feature 1..16: note = Synthetic construct
  source 1..16: mol_type = other DNA
ccacctaagtagtgcg

SEQ ID NO: 1938 - DNA, 16 bp, synthetic construct
  misc_feature 1..16: note = Synthetic construct
  source 1..16: mol_type = other DNA
tgctaccgtctgatca

SEQ ID NO: 1939 - DNA, 16 bp, synthetic construct
  misc_feature 1..16: note = Synthetic construct
  source 1..16: mol_type = other DNA
gctgcagcacaggagt

SEQ ID NO: 1940 - DNA, 16 bp, synthetic construct
  misc_feature 1..16: note = Synthetic construct
  source 1..16: mol_type = other DNA
tatcaggagtacgccc

SEQ ID NO: 1941 - DNA, 16 bp, synthetic construct
  misc_feature 1..16: note = Synthetic construct
  source 1..16: mol_type = other DNA
aatcggtcatagaaac

SEQ ID NO: 1942 - DNA, 16 bp, synthetic construct
  misc_feature 1..16: note = Synthetic construct
  source 1..16: mol_type = other DNA
ggacaagcacgaagca

SEQ ID NO: 1943 - DNA, 16 bp, synthetic construct
  misc_feature 1..16: note = Synthetic construct
  source 1..16: mol_type = other DNA
aggccactcggtctaa

SEQ ID NO: 1944 - DNA, 16 bp, synthetic construct
  misc_feature 1..16: note = Synthetic construct
  source 1..16: mol_type = other DNA
aggtcatagatatgca

SEQ ID NO: 1945 - DNA, 16 bp, synthetic construct
  misc_feature 1..16: note = Synthetic construct
  source 1..16: mol_type = other DNA
gccaaatcaatagcaa

SEQ ID NO: 1946 - DNA, 16 bp, synthetic construct
  misc_feature 1..16: note = Synthetic construct
  source 1..16: mol_type = other DNA
aaccatgtcagtccct

SEQ ID NO: 1947 - DNA, 16 bp, synthetic construct
  misc_feature 1..16: note = Synthetic construct
  source 1..16: mol_type = other DNA
tatcaggcatacgcta

SEQ ID NO: 1948 - DNA, 16 bp, synthetic construct
  misc_feature 1..16: note = Synthetic construct
  source 1..16: mol_type = other DNA
acactgacatgcctaa

SEQ ID NO: 1949 - DNA, 16 bp, synthetic construct
  misc_feature 1..16: note = Synthetic construct
  source 1..16: mol_type = other DNA
ttgcgtccaggcagta

SEQ ID NO: 1950 - DNA, 16 bp, synthetic construct
  misc_feature 1..16: note = Synthetic construct
  source 1..16: mol_type = other DNA
caccagggtgtctgat

SEQ ID NO: 1951 - DNA, 16 bp, synthetic construct
  misc_feature 1..16: note = Synthetic construct
  source 1..16: mol_type = other DNA
aagccgccaggtctcg

SEQ ID NO: 1952 - DNA, 16 bp, synthetic construct
  misc_feature 1..16: note = Synthetic construct
  source 1..16: mol_type = other DNA
catgcctgtctgcaat

SEQ ID NO: 1953 - DNA, 16 bp, synthetic construct
  misc_feature 1..16: note = Synthetic construct
  source 1..16: mol_type = other DNA
aaacgggaggccctca

SEQ ID NO: 1954 - DNA, 16 bp, synthetic construct
  misc_feature 1..16: note = Synthetic construct
  source 1..16: mol_type = other DNA
catcaagtccaatggt

SEQ ID NO: 1955 - DNA, 16 bp, synthetic construct
  misc_feature 1..16: note = Synthetic construct
  source 1..16: mol_type = other DNA
ggacatttcctagtga

SEQ ID NO: 1956 - DNA, 16 bp, synthetic construct
  misc_feature 1..16: note = Synthetic construct
  source 1..16: mol_type = other DNA
gagcagaagaacaatc

SEQ ID NO: 1957 - DNA, 16 bp, synthetic construct
  misc_feature 1..16: note = Synthetic construct
  source 1..16: mol_type = other DNA
gactgcgcaaggttct

SEQ ID NO: 1958 - DNA, 16 bp, synthetic construct
  misc_feature 1..16: note = Synthetic construct
  source 1..16: mol_type = other DNA
cctagctgtactcgcg

SEQ ID NO: 1959 - DNA, 16 bp, synthetic construct
  misc_feature 1..16: note = Synthetic construct
  source 1..16: mol_type = other DNA
catatgggtcgagttt

SEQ ID NO: 1960 - DNA, 16 bp, synthetic construct
  misc_feature 1..16: note = Synthetic construct
  source 1..16: mol_type = other DNA
gcgcgatagatcgata

SEQ ID NO: 1961 - DNA, 16 bp, synthetic construct
  misc_feature 1..16: note = Synthetic construct
  source 1..16: mol_type = other DNA
tgagcatagaggtaga

SEQ ID NO: 1962 - DNA, 16 bp, synthetic construct
  misc_feature 1..16: note = Synthetic construct
  source 1..16: mol_type = other DNA
tttatgccatgtctcc

SEQ ID NO: 1963 - DNA, 16 bp, synthetic construct
  misc_feature 1..16: note = Synthetic construct
  source 1..16: mol_type = other DNA
gtatcttagagcccaa

SEQ ID NO: 1964 - DNA, 16 bp, synthetic construct
  misc_feature 1..16: note = Synthetic construct
  source 1..16: mol_type = other DNA
ctgtttagttgtggag

SEQ ID NO: 1965 - DNA, 16 bp, synthetic construct
  misc_feature 1..16: note = Synthetic construct
  source 1..16: mol_type = other DNA
atcatggtcagtgttg

SEQ ID NO: 1966 - DNA, 16 bp, synthetic construct
  misc_feature 1..16: note = Synthetic construct
  source 1..16: mol_type = other DNA
tagttggcaagctgtt

SEQ ID NO: 1967 - DNA, 16 bp, synthetic construct
  misc_feature 1..16: note = Synthetic construct
  source 1..16: mol_type = other DNA
cctttctgtcacttcc

SEQ ID NO: 1968 - DNA, 16 bp, synthetic construct
  misc_feature 1..16: note = Synthetic construct
  source 1..16: mol_type = other DNA
cgattgaagaataggg

SEQ ID NO: 1969 - DNA, 16 bp, synthetic construct
  misc_feature 1..16: note = Synthetic construct
  source 1..16: mol_type = other DNA
ccgtggatctgtcaag

SEQ ID NO: 1970 - DNA, 16 bp, synthetic construct
  misc_feature 1..16: note = Synthetic construct
  source 1..16: mol_type = other DNA
tatgcccgtgagtata

SEQ ID NO: 1971 - DNA, 16 bp, synthetic construct
  misc_feature 1..16: note = Synthetic construct
  source 1..16: mol_type = other DNA
cgtgtaaagtcatcca

SEQ ID NO: 1972 - DNA, 16 bp, synthetic construct
  misc_feature 1..16: note = Synthetic construct
  source 1..16: mol_type = other DNA
catggcggttcgttga

SEQ ID NO: 1973 - DNA, 16 bp, synthetic construct
  misc_feature 1..16: note = Synthetic construct
  source 1..16: mol_type = other DNA
agcagcctcggccgat

SEQ ID NO: 1974 - DNA, 16 bp, synthetic construct
  misc_feature 1..16: note = Synthetic construct
  source 1..16: mol_type = other DNA
gcttgaaagatcgggt

SEQ ID NO: 1975 - DNA, 16 bp, synthetic construct
  misc_feature 1..16: note = Synthetic construct
  source 1..16: mol_type = other DNA
ctctacgagctcaact

SEQ ID NO: 1976 - DNA, 16 bp, synthetic construct
  misc_feature 1..16: note = Synthetic construct
  source 1..16: mol_type = other DNA
aggccacgtaaacctc

SEQ ID NO: 1977 - DNA, 16 bp, synthetic construct
  misc_feature 1..16: note = Synthetic construct
  source 1..16: mol_type = other DNA
gggttgcagtacgata

SEQ ID NO: 1978 - DNA, 16 bp, synthetic construct
  misc_feature 1..16: note = Synthetic construct
  source 1..16: mol_type = other DNA
cttaccgcagtacact

SEQ ID NO: 1979 - DNA, 16 bp, synthetic construct
  misc_feature 1..16: note = Synthetic construct
  source 1..16: mol_type = other DNA
ccttcgacatacgccg

SEQ ID NO: 1980 - DNA, 16 bp, synthetic construct
  misc_feature 1..16: note = Synthetic construct
  source 1..16: mol_type = other DNA
cagtaacagaataggg

SEQ ID NO: 1981 - DNA, 16 bp, synthetic construct
  misc_feature 1..16: note = Synthetic construct
  source 1..16: mol_type = other DNA
atgagggtcaacgcta

SEQ ID NO: 1982 - DNA, 16 bp, synthetic construct
  misc_feature 1..16: note = Synthetic construct
  source 1..16: mol_type = other DNA
agacgttgtcgaacag

SEQ ID NO: 1983 - DNA, 16 bp, synthetic construct
  misc_feature 1..16: note = Synthetic construct
  source 1..16: mol_type = other DNA
ttctcaatcgcaggct

SEQ ID NO: 1984 - DNA, 16 bp, synthetic construct
  misc_feature 1..16: note = Synthetic construct
  source 1..16: mol_type = other DNA
ccctcctaggatgtat

SEQ ID NO: 1985 - DNA, 16 bp, synthetic construct
  misc_feature 1..16: note = Synthetic construct
  source 1..16: mol_type = other DNA
cgctatcgtaaatgtg

SEQ ID NO: 1986 - DNA, 16 bp, synthetic construct
  misc_feature 1..16: note = Synthetic construct
  source 1..16: mol_type = other DNA
tcagctctcgctagcg

SEQ ID NO: 1987 - DNA, 16 bp, synthetic construct
  misc_feature 1..16: note = Synthetic construct
  source 1..16: mol_type = other DNA
gctctgtgtgcaccac

SEQ ID NO: 1988 - DNA, 16 bp, synthetic construct
  misc_feature 1..16: note = Synthetic construct
  source 1..16: mol_type = other DNA
acaccgggtcgtcttc

SEQ ID NO: 1989 - DNA, 16 bp, synthetic construct
  misc_feature 1..16: note = Synthetic construct
  source 1..16: mol_type = other DNA
ctgaaacaggtgttaa

SEQ ID NO: 1990 - DNA, 16 bp, synthetic construct
  misc_feature 1..16: note = Synthetic construct
  source 1..16: mol_type = other DNA
gtgcttctctcggacg

SEQ ID NO: 1991 - DNA, 16 bp, synthetic construct
  misc_feature 1..16: note = Synthetic construct
  source 1..16: mol_type = other DNA
ggaacttagggatctg

SEQ ID NO: 1992 - DNA, 16 bp, synthetic construct
  misc_feature 1..16: note = Synthetic construct
  source 1..16: mol_type = other DNA
gggcacttcgccataa

SEQ ID NO: 1993 - DNA, 16 bp, synthetic construct
  misc_feature 1..16: note = Synthetic construct
  source 1..16: mol_type = other DNA
acgccgaagaaaccgc

SEQ ID NO: 1994 - DNA, 16 bp, synthetic construct
  misc_feature 1..16: note = Synthetic construct
  source 1..16: mol_type = other DNA
cagatcacacctatcc

SEQ ID NO: 1995 - DNA, 16 bp, synthetic construct
  misc_feature 1..16: note = Synthetic construct
  source 1..16: mol_type = other DNA
ccggtagtctaactct

SEQ ID NO: 1996 - DNA, 16 bp, synthetic construct
  misc_feature 1..16: note = Synthetic construct
  source 1..16: mol_type = other DNA
ttcgaagtcccaagat

SEQ ID NO: 1997 - DNA, 16 bp, synthetic construct
  misc_feature 1..16: note = Synthetic construct
  source 1..16: mol_type = other DNA
gtcgggtgtaatcacc

SEQ ID NO: 1998 - DNA, 16 bp, synthetic construct
  misc_feature 1..16: note = Synthetic construct
  source 1..16: mol_type = other DNA
cgattgaagattaccc

SEQ ID NO: 1999 - DNA, 16 bp, synthetic construct
  misc_feature 1..16: note = Synthetic construct
  source 1..16: mol_type = other DNA
gcatgtaagcttatcg

SEQ ID NO: 2000 - DNA, 16 bp, synthetic construct
  misc_feature 1..16: note = Synthetic construct
  source 1..16: mol_type = other DNA
agcggtctccacgtgg

SEQ ID NO: 2001 - DNA, 16 bp, synthetic construct
  misc_feature 1..16: note = Synthetic construct
  source 1..16: mol_type = other DNA
tactcgccaatagagt

SEQ ID NO: 2002 - DNA, 16 bp, synthetic construct
  misc_feature 1..16: note = Synthetic construct
  source 1..16: mol_type = other DNA
cgggtcatccaaacac

SEQ ID NO: 2003 - DNA, 16 bp, synthetic construct
  misc_feature 1..16: note = Synthetic construct
  source 1..16: mol_type = other DNA
aaagtagagtcccacg

SEQ ID NO: 2004 - DNA, 16 bp, synthetic construct
  misc_feature 1..16: note = Synthetic construct
  source 1..16: mol_type = other DNA
gttcattagtgactct

SEQ ID NO: 2005 - DNA, 16 bp, synthetic construct
  misc_feature 1..16: note = Synthetic construct
  source 1..16: mol_type = other DNA
ctcggaggtaacgcga

SEQ ID NO: 2006 - DNA, 16 bp, synthetic construct
  misc_feature 1..16: note = Synthetic construct
  source 1..16: mol_type = other DNA
aggccacgtcgaacag

SEQ ID NO: 2007 - DNA, 16 bp, synthetic construct
  misc_feature 1..16: note = Synthetic construct
  source 1..16: mol_type = other DNA
ccaatccagttcgcat

SEQ ID NO: 2008 - DNA, 16 bp, synthetic construct
  misc_feature 1..16: note = Synthetic construct
  source 1..16: mol_type = other DNA
gtcacaatcgtggacc

SEQ ID NO: 2009 - DNA, 16 bp, synthetic construct
  misc_feature 1..16: note = Synthetic construct
  source 1..16: mol_type = other DNA
tggttagagtttcctt

SEQ ID NO: 2010 - DNA, 16 bp, synthetic construct
  misc_feature 1..16: note = Synthetic construct
  source 1..16: mol_type = other DNA
agagcgatctacttac

SEQ ID NO: 2011 - DNA, 16 bp, synthetic construct
  misc_feature 1..16: note = Synthetic construct
  source 1..16: mol_type = other DNA
tggcgcacataccatg

SEQ ID NO: 2012 - DNA, 16 bp, synthetic construct
  misc_feature 1..16: note = Synthetic construct
  source 1..16: mol_type = other DNA
acggagatcattatcc

SEQ ID NO: 2013 - DNA, 16 bp, synthetic construct
  misc_feature 1..16: note = Synthetic construct
  source 1..16: mol_type = other DNA
cagccgacagtgagtg

SEQ ID NO: 2014 - DNA, 16 bp, synthetic construct
  misc_feature 1..16: note = Synthetic construct
  source 1..16: mol_type = other DNA
ctgaagtcaagcgagt

SEQ ID NO: 2015 - DNA, 16 bp, synthetic construct
  misc_feature 1..16: note = Synthetic construct
  source 1..16: mol_type = other DNA
ctgtgcttcgggagta

SEQ ID NO: 2016 - DNA, 16 bp, synthetic construct
  misc_feature 1..16: note = Synthetic construct
  source 1..16: mol_type = other DNA
gtcacaacaagtagta

SEQ ID NO: 2017 - DNA, 16 bp, synthetic construct
  misc_feature 1..16: note = Synthetic construct
  source 1..16: mol_type = other DNA
taaaccggttccacaa

SEQ ID NO: 2018 - DNA, 16 bp, synthetic construct
  misc_feature 1..16: note = Synthetic construct
  source 1..16: mol_type = other DNA
taaaccgtcacctcgt

SEQ ID NO: 2019 - DNA, 16 bp, synthetic construct
  misc_feature 1..16: note = Synthetic construct
  source 1..16: mol_type = other DNA
tacttacagagtcggt

SEQ ID NO: 2020 - DNA, 16 bp, synthetic construct
  misc_feature 1..16: note = Synthetic construct
  source 1..16: mol_type = other DNA
agattgctcgcggatc

SEQ ID NO: 2021 - DNA, 16 bp, synthetic construct
  misc_feature 1..16: note = Synthetic construct
  source 1..16: mol_type = other DNA
gctcctatcttcatgt

SEQ ID NO: 2022 - DNA, 16 bp, synthetic construct
  misc_feature 1..16: note = Synthetic construct
  source 1..16: mol_type = other DNA
tacctattctggagcc

SEQ ID NO: 2023 - DNA, 16 bp, synthetic construct
  misc_feature 1..16: note = Synthetic construct
  source 1..16: mol_type = other DNA
aaacgggagaggttat

SEQ ID NO: 2024 - DNA, 16 bp, synthetic construct
  misc_feature 1..16: note = Synthetic construct
  source 1..16: mol_type = other DNA
actgtccagccaggat

SEQ ID NO: 2025 - DNA, 16 bp, synthetic construct
  misc_feature 1..16: note = Synthetic construct
  source 1..16: mol_type = other DNA
ctcgtcagtatgaaac

SEQ ID NO: 2026 - DNA, 16 bp, synthetic construct
  misc_feature 1..16: note = Synthetic construct
  source 1..16: mol_type = other DNA
ccgtacttcttagagc

SEQ ID NO: 2027 - DNA, 16 bp, synthetic construct
  misc_feature 1..16: note = Synthetic construct
  source 1..16: mol_type = other DNA
caagatctcaaaccgt

SEQ ID NO: 2028 - DNA, 16 bp, synthetic construct
  misc_feature 1..16: note = Synthetic construct
  source 1..16: mol_type = other DNA
gaacctatccagtagt

SEQ ID NO: 2029 - DNA, 16 bp, synthetic construct
  misc_feature 1..16: note = Synthetic construct
  source 1..16: mol_type = other DNA
atgtgtggtcttgtcc

SEQ ID NO: 2030 - DNA, 16 bp, synthetic construct
  misc_feature 1..16: note = Synthetic construct
  source 1..16: mol_type = other DNA
taagtgcgtgcggtaa

SEQ ID NO: 2031 - DNA, 16 bp, synthetic construct
  misc_feature 1..16: note = Synthetic construct
  source 1..16: mol_type = other DNA
cagaatccaagacacg

SEQ ID NO: 2032 - DNA, 16 bp, synthetic construct
  misc_feature 1..16: note = Synthetic construct
  source 1..16: mol_type = other DNA
atgtgtgcacctatcc

SEQ ID NO: 2033 - DNA, 16 bp, synthetic construct
  misc_feature 1..16: note = Synthetic construct
  source 1..16: mol_type = other DNA
cggagtcgtaagggaa

SEQ ID NO: 2034 - DNA, 16 bp, synthetic construct
  misc_feature 1..16: note = Synthetic construct
  source 1..16: mol_type = other DNA
catcaagagtgaacgc

SEQ ID NO: 2035 - DNA, 16 bp, synthetic construct
  misc_feature 1..16: note = Synthetic construct
  source 1..16: mol_type = other DNA
cgggtcatctggttcc

SEQ ID NO: 2036 - DNA, 16 bp, synthetic construct
  misc_feature 1..16: note = Synthetic construct
  source 1..16: mol_type = other DNA
aggccgtcaaacaaca

SEQ ID NO: 2037 - DNA, 16 bp, synthetic construct
  misc_feature 1..16: note = Synthetic construct
  source 1..16: mol_type = other DNA
acgcagccaagcctat

SEQ ID NO: 2038 - DNA, 16 bp, synthetic construct
  misc_feature 1..16: note = Synthetic construct
  source 1..16: mol_type = other DNA
gtaggcccacggtaag

SEQ ID NO: 2039 - DNA, 16 bp, synthetic construct
  misc_feature 1..16: note = Synthetic construct
  source 1..16: mol_type = other DNA
tcaggtacactatctt

SEQ ID NO: 2040 - DNA, 16 bp, synthetic construct
  misc_feature 1..16: note = Synthetic construct
  source 1..16: mol_type = other DNA
tgcgggttcacttcat

SEQ ID NO: 2041 - DNA, 16 bp, synthetic construct
  misc_feature 1..16: note = Synthetic construct
  source 1..16: mol_type = other DNA
gcatgcgagtcaaggc

SEQ ID NO: 2042 - DNA, 16 bp, synthetic construct
  misc_feature 1..16: note = Synthetic construct
  source 1..16: mol_type = other DNA
tcacaagcaacaacct

SEQ ID NO: 2043 - DNA, 16 bp, synthetic construct
  misc_feature 1..16: note = Synthetic construct
  source 1..16: mol_type = other DNA
gtcaagtgtaggagtc

SEQ ID NO: 2044 - DNA, 16 bp, synthetic construct
  misc_feature 1..16: note = Synthetic construct
  source 1..16: mol_type = other DNA
actgatgtctatgtgg

SEQ ID NO: 2045 - DNA, 16 bp, synthetic construct
  misc_feature 1..16: note = Synthetic construct
  source 1..16: mol_type = other DNA
aactttctctttagtc

SEQ ID NO: 2046 - DNA, 16 bp, synthetic construct
  misc_feature 1..16: note = Synthetic construct
  source 1..16: mol_type = other DNA
catgacagtattaccg

SEQ ID NO: 2047 - DNA, 16 bp, synthetic construct
  misc_feature 1..16: note = Synthetic construct
  source 1..16: mol_type = other DNA
atcatggtccgatatg

SEQ ID NO: 2048 - DNA, 16 bp, synthetic construct
  misc_feature 1..16: note = Synthetic construct
  source 1..16: mol_type = other DNA
actgatgagataggag

SEQ ID NO: 2049 - DNA, 16 bp, synthetic construct
  misc_feature 1..16: note = Synthetic construct
  source 1..16: mol_type = other DNA
gcatacagtacttctt

SEQ ID NO: 2050 - DNA, 16 bp, synthetic construct
  misc_feature 1..16: note = Synthetic construct
  source 1..16: mol_type = other DNA
gggtctggtccgacgt

SEQ ID NO: 2051 - DNA, 16 bp, synthetic construct
  misc_feature 1..16: note = Synthetic construct
  source 1..16: mol_type = other DNA
cccagttagtagcggt

SEQ ID NO: 2052 - DNA, 16 bp, synthetic construct
  misc_feature 1..16: note = Synthetic construct
  source 1..16: mol_type = other DNA
ttgtaggcacctatcc

SEQ ID NO: 2053 - DNA, 16 bp, synthetic construct
  misc_feature 1..16: note = Synthetic construct
  source 1..16: mol_type = other DNA
gtgttagagcaccgct

SEQ ID NO: 2054 - DNA, 16 bp, synthetic construct
  misc_feature 1..16: note = Synthetic construct
  source 1..16: mol_type = other DNA
gcgccaatcaacgcta

SEQ ID NO: 2055 - DNA, 16 bp, synthetic construct
  misc_feature 1..16: note = Synthetic construct
  source 1..16: mol_type = other DNA
gcgagaagtatcacca

SEQ ID NO: 2056 - DNA, 16 bp, synthetic construct
  misc_feature 1..16: note = Synthetic construct
  source 1..16: mol_type = other DNA
gaatgaaagaagaagc

SEQ ID NO: 2057 - DNA, 16 bp, synthetic construct
  misc_feature 1..16: note = Synthetic construct
  source 1..16: mol_type = other DNA
agctctcgttatcggt

SEQ ID NO: 2058 - DNA, 16 bp, synthetic construct
  misc_feature 1..16: note = Synthetic construct
  source 1..16: mol_type = other DNA
gcgcaactctcgcatc

SEQ ID NO: 2059 - DNA, 16 bp, synthetic construct
  misc_feature 1..16: note = Synthetic construct
  source 1..16: mol_type = other DNA
gcactctgtaccagtt

SEQ ID NO: 2060 - DNA, 16 bp, synthetic construct
  misc_feature 1..16: note = Synthetic construct
  source 1..16: mol_type = other DNA
cgctatcgtgaaagag

SEQ ID NO: 2061 - DNA, 16 bp, synthetic construct
  misc_feature 1..16: note = Synthetic construct
  source 1..16: mol_type = other DNA
cgcgttttcctaagtg

SEQ ID NO: 2062 - DNA, 16 bp, synthetic construct
  misc_feature 1..16: note = Synthetic construct
  source 1..16: mol_type = other DNA
cgaatgtcaatccgat

SEQ ID NO: 2063 - DNA, 16 bp, synthetic construct
  misc_feature 1..16: note = Synthetic construct
  source 1..16: mol_type = other DNA
gcaaacttctccaggg

SEQ ID NO: 2064 - DNA, 16 bp, synthetic construct
  misc_feature 1..16: note = Synthetic construct
  source 1..16: mol_type = other DNA
cgttagagtcctgctt

SEQ ID NO: 2065 - DNA, 16 bp, synthetic construct
  misc_feature 1..16: note = Synthetic construct
  source 1..16: mol_type = other DNA
cgatgtacattcactt

SEQ ID NO: 2066 - DNA, 16 bp, synthetic construct
  misc_feature 1..16: note = Synthetic construct
  source 1..16: mol_type = other DNA
agagcttgttcgctaa

SEQ ID NO: 2067 - DNA, 16 bp, synthetic construct
  misc_feature 1..16: note = Synthetic construct
  source 1..16: mol_type = other DNA
cagagagagctgaaat

SEQ ID NO: 2068 - DNA, 16 bp, synthetic construct
  misc_feature 1..16: note = Synthetic construct
  source 1..16: mol_type = other DNA
gtcgggtcacaacgtt

SEQ ID NO: 2069 - DNA, 16 bp, synthetic construct
  misc_feature 1..16: note = Synthetic construct
  source 1..16: mol_type = other DNA
cgaatgtgtacaagta

SEQ ID NO: 2070 - DNA, 16 bp, synthetic construct
  misc_feature 1..16: note = Synthetic construct
  source 1..16: mol_type = other DNA
agcttgatccgcgcaa

SEQ ID NO: 2071 - DNA, 16 bp, synthetic construct
  misc_feature 1..16: note = Synthetic construct
  source 1..16: mol_type = other DNA
cgttagatcccggatg

SEQ ID NO: 2072 - DNA, 16 bp, synthetic construct
  misc_feature 1..16: note = Synthetic construct
  source 1..16: mol_type = other DNA
tactcgcagtagccga

SEQ ID NO: 2073 - DNA, 16 bp, synthetic construct
  misc_feature 1..16: note = Synthetic construct
  source 1..16: mol_type = other DNA
cagcagcgttaagatg

SEQ ID NO: 2074 - DNA, 16 bp, synthetic construct
  misc_feature 1..16: note = Synthetic construct
  source 1..16: mol_type = other DNA
catcgggaggacagaa

SEQ ID NO: 2075 - DNA, 16 bp, synthetic construct
  misc_feature 1..16: note = Synthetic construct
  source 1..16: mol_type = other DNA
acggccaagctgcaag

SEQ ID NO: 2076 - DNA, 16 bp, synthetic construct
  misc_feature 1..16: note = Synthetic construct
  source 1..16: mol_type = other DNA
acgaggaagaaaccta

SEQ ID NO: 2077 - DNA, 16 bp, synthetic construct
  misc_feature 1..16: note = Synthetic construct
  source 1..16: mol_type = other DNA
cgagccacagacgcaa

SEQ ID NO: 2078 - DNA, 16 bp, synthetic construct
  misc_feature 1..16: note = Synthetic construct
  source 1..16: mol_type = other DNA
tattaccagaagccca

SEQ ID NO: 2079 - DNA, 16 bp, synthetic construct
  misc_feature 1..16: note = Synthetic construct
  source 1..16: mol_type = other DNA
caacctccacttacga

SEQ ID NO: 2080 - DNA, 16 bp, synthetic construct
  misc_feature 1..16: note = Synthetic construct
  source 1..16: mol_type = other DNA
agagcgaagagatgag

SEQ ID NO: 2081 - DNA, 16 bp, synthetic construct
  misc_feature 1..16: note = Synthetic construct
  source 1..16: mol_type = other DNA
gcacataagagactat

SEQ ID NO: 2082 - DNA, 16 bp, synthetic construct
  misc_feature 1..16: note = Synthetic construct
  source 1..16: mol_type = other DNA
aaggagcgtagctgcc

SEQ ID NO: 2083 - DNA, 16 bp, synthetic construct
  misc_feature 1..16: note = Synthetic construct
  source 1..16: mol_type = other DNA
gtaacgtgtgttaaga

SEQ ID NO: 2084 - DNA, 16 bp, synthetic construct
  misc_feature 1..16: note = Synthetic construct
  source 1..16: mol_type = other DNA
atccacccacttcgaa

SEQ ID NO: 2085 - DNA, 16 bp, synthetic construct
  misc_feature 1..16: note = Synthetic construct
  source 1..16: mol_type = other DNA
ctctacgcacctcgga

SEQ ID NO: 2086 - DNA, 16 bp, synthetic construct
  misc_feature 1..16: note = Synthetic construct
  source 1..16: mol_type = other DNA
gaggtgaagggtatcg

SEQ ID NO: 2087 - DNA, 16 bp, synthetic construct
  misc_feature 1..16: note = Synthetic construct
  source 1..16: mol_type = other DNA
cagctggtcaataccg

SEQ ID NO: 2088 - DNA, 16 bp, synthetic construct
  misc_feature 1..16: note = Synthetic construct
  source 1..16: mol_type = other DNA
gggacctcaaggtgtg

SEQ ID NO: 2089 - DNA, 16 bp, synthetic construct
  misc_feature 1..16: note = Synthetic construct
  source 1..16: mol_type = other DNA
cacactcagaaggttt

SEQ ID NO: 2090 - DNA, 16 bp, synthetic construct
  misc_feature 1..16: note = Synthetic construct
  source 1..16: mol_type = other DNA
gatgaaagttagatga

SEQ ID NO: 2091 - DNA, 16 bp, synthetic construct
  misc_feature 1..16: note = Synthetic construct
  source 1..16: mol_type = other DNA
ttgtaggtcctgtaga

SEQ ID NO: 2092 - DNA, 16 bp, synthetic construct
  misc_feature 1..16: note = Synthetic construct
  source 1..16: mol_type = other DNA
actgctccagtgggat

SEQ ID NO: 2093 - DNA, 16 bp, synthetic construct
  misc_feature 1..16: note = Synthetic construct
  source 1..16: mol_type = other DNA
ctcattaagaacaact

SEQ ID NO: 2094 - DNA, 16 bp, synthetic construct
  misc_feature 1..16: note = Synthetic construct
  source 1..16: mol_type = other DNA
ctacattagacagacc

SEQ ID NO: 2095 - DNA, 16 bp, synthetic construct
  misc_feature 1..16: note = Synthetic construct
  source 1..16: mol_type = other DNA
agtctttaggagcgtt

SEQ ID NO: 2096 - DNA, 16 bp, synthetic construct
  misc_feature 1..16: note = Synthetic construct
  source 1..16: mol_type = other DNA
cttaggatccaaagtc

SEQ ID NO: 2097 - DNA, 16 bp, synthetic construct
  misc_feature 1..16: note = Synthetic construct
  source 1..16: mol_type = other DNA
tcgtagagtcctcttg

SEQ ID NO: 2098 - DNA, 16 bp, synthetic construct
  misc_feature 1..16: note = Synthetic construct
  source 1..16: mol_type = other DNA
attatcctccgcgttt

SEQ ID NO: 2099 - DNA, 16 bp, synthetic construct
  misc_feature 1..16: note = Synthetic construct
  source 1..16: mol_type = other DNA
aactcttgtgagggtt

SEQ ID NO: 2100 - DNA, 16 bp, synthetic construct
  misc_feature 1..16: note = Synthetic construct
  source 1..16: mol_type = other DNA
gtgtgcggtgacgcct

SEQ ID NO: 2101 - DNA, 16 bp, synthetic construct
  misc_feature 1..16: note = Synthetic construct
  source 1..16: mol_type = other DNA
gggaccttcaaacaag

SEQ ID NO: 2102 - DNA, 16 bp, synthetic construct
  misc_feature 1..16: note = Synthetic construct
  source 1..16: mol_type = other DNA
gatcagttcggaatct

SEQ ID NO: 2103 - DNA, 16 bp, synthetic construct
  misc_feature 1..16: note = Synthetic construct
  source 1..16: mol_type = other DNA
tgcacctaggcacatg

SEQ ID NO: 2104 - DNA, 16 bp, synthetic construct
  misc_feature 1..16: note = Synthetic construct
  source 1..16: mol_type = other DNA
aggtccgtccgcgttt

SEQ ID NO: 2105 - DNA, 16 bp, synthetic construct
  misc_feature 1..16: note = Synthetic construct
  source 1..16: mol_type = other DNA
cctaaagtcagaggtg

SEQ ID NO: 2106 - DNA, 16 bp, synthetic construct
  misc_feature 1..16: note = Synthetic construct
  source 1..16: mol_type = other DNA
tggttagcaatcggtt

SEQ ID NO: 2107 - DNA, 16 bp, synthetic construct
  misc_feature 1..16: note = Synthetic construct
  source 1..16: mol_type = other DNA
atcgagtagatgtaac

SEQ ID NO: 2108 - DNA, 16 bp, synthetic construct
  misc_feature 1..16: note = Synthetic construct
  source 1..16: mol_type = other DNA
gtgcatagtcgcgtgt

SEQ ID NO: 2109 - DNA, 16 bp, synthetic construct
  misc_feature 1..16: note = Synthetic construct
  source 1..16: mol_type = other DNA
gcatacagtccctact

SEQ ID NO: 2110 - DNA, 16 bp, synthetic construct
  misc_feature 1..16: note = Synthetic construct
  source 1..16: mol_type = other DNA
gcactctcagctggct

SEQ ID NO: 2111 - DNA, 16 bp, synthetic construct
  misc_feature 1..16: note = Synthetic construct
  source 1..16: mol_type = other DNA
atgagggtcctacaga

SEQ ID NO: 2112 - DNA, 16 bp, synthetic construct
  misc_feature 1..16: note = Synthetic construct
  source 1..16: mol_type = other DNA
ctcgaggagagcaatt

SEQ ID NO: 2113 - DNA, 16 bp, synthetic construct
  misc_feature 1..16: note = Synthetic construct
  source 1..16: mol_type = other DNA
cacatttaggaattac

SEQ ID NO: 2114 - DNA, 16 bp, synthetic construct
  misc_feature 1..16: note = Synthetic construct
  source 1..16: mol_type = other DNA
tgagccgagctcaact

SEQ ID NO: 2115 - DNA, 16 bp, synthetic construct
  misc_feature 1..16: note = Synthetic construct
  source 1..16: mol_type = other DNA
catcgggagcaatctc

SEQ ID NO: 2116 - DNA, 16 bp, synthetic construct
  misc_feature 1..16: note = Synthetic construct
  source 1..16: mol_type = other DNA
tcagctccacatttct

SEQ ID NO: 2117 - DNA, 16 bp, synthetic construct
  misc_feature 1..16: note = Synthetic construct
  source 1..16: mol_type = other DNA
gcgcagtagcgtttac

SEQ ID NO: 2118 - DNA, 16 bp, synthetic construct
  misc_feature 1..16: note = Synthetic construct
  source 1..16: mol_type = other DNA
catattctcagagctt

SEQ ID NO: 2119 - DNA, 16 bp, synthetic construct
  misc_feature 1..16: note = Synthetic construct
  source 1..16: mol_type = other DNA
ccacctatcatctgcc

SEQ ID NO: 2120 - DNA, 16 bp, synthetic construct
  misc_feature 1..16: note = Synthetic construct
  source 1..16: mol_type = other DNA
cgaccttcagcgttcg

SEQ ID NO: 2121 - DNA, 16 bp, synthetic construct
  misc_feature 1..16: note = Synthetic construct
  source 1..16: mol_type = other DNA
gttaagccactctgtc

SEQ ID NO: 2122 - DNA, 16 bp, synthetic construct
  misc_feature 1..16: note = Synthetic construct
  source 1..16: mol_type = other DNA
ttgtagggtgaaggct

SEQ ID NO: 2123 - DNA, 16 bp, synthetic construct
  misc_feature 1..16: note = Synthetic construct
  source 1..16: mol_type = other DNA
cacataggtcgcgtgt

SEQ ID NO: 2124 - DNA, 16 bp, synthetic construct
  misc_feature 1..16: note = Synthetic construct
  source 1..16: mol_type = other DNA
gacagagcaagaagag

SEQ ID NO: 2125 - DNA, 16 bp, synthetic construct
  misc_feature 1..16: note = Synthetic construct
  source 1..16: mol_type = other DNA
gacagagcatacagct

SEQ ID NO: 2126 - DNA, 16 bp, synthetic construct
  misc_feature 1..16: note = Synthetic construct
  source 1..16: mol_type = other DNA
gcttccagtcccgaca

SEQ ID NO: 2127 - DNA, 16 bp, synthetic construct
  misc_feature 1..16: note = Synthetic construct
  source 1..16: mol_type = other DNA
agatctgcaagcgagt

SEQ ID NO: 2128 - DNA, 16 bp, synthetic construct
  misc_feature 1..16: note = Synthetic construct
  source 1..16: mol_type = other DNA
tgagccgcactaagtc

SEQ ID NO: 2129 - DNA, 16 bp, synthetic construct
  misc_feature 1..16: note = Synthetic construct
  source 1..16: mol_type = other DNA
tctgagatctactatc

SEQ ID NO: 2130 - DNA, 16 bp, synthetic construct
  misc_feature 1..16: note = Synthetic construct
  source 1..16: mol_type = other DNA
accagtacatccaaca

SEQ ID NO: 2131 - DNA, 16 bp, synthetic construct
  misc_feature 1..16: note = Synthetic construct
  source 1..16: mol_type = other DNA
tcggtaaagatgcctt

SEQ ID NO: 2132 - DNA, 16 bp, synthetic construct
  misc_feature 1..16: note = Synthetic construct
  source 1..16: mol_type = other DNA
taaaccgaggatgcgt

SEQ ID NO: 2133 - DNA, 16 bp, synthetic construct
  misc_feature 1..16: note = Synthetic construct
  source 1..16: mol_type = other DNA
ctagtgaaggttccta

SEQ ID NO: 2134 - DNA, 16 bp, synthetic construct
  misc_feature 1..16: note = Synthetic construct
  source 1..16: mol_type = other DNA
accgtaacattgagct

SEQ ID NO: 2135 - DNA, 16 bp, synthetic construct
  misc_feature 1..16: note = Synthetic construct
  source 1..16: mol_type = other DNA
ccatgtcgtcacctaa

SEQ ID NO: 2136 - DNA, 16 bp, synthetic construct
  misc_feature 1..16: note = Synthetic construct
  source 1..16: mol_type = other DNA
tgcgggttcctagaac

SEQ ID NO: 2137 - DNA, 16 bp, synthetic construct
  misc_feature 1..16: note = Synthetic construct
  source 1..16: mol_type = other DNA
actttcaaggcaggtt

SEQ ID NO: 2138 - DNA, 16 bp, synthetic construct
  misc_feature 1..16: note = Synthetic construct
  source 1..16: mol_type = other DNA
gcactctcacgaggta

SEQ ID NO: 2139 - DNA, 16 bp, synthetic construct
  misc_feature 1..16: note = Synthetic construct
  source 1..16: mol_type = other DNA
tgttccgagaactcgg

SEQ ID NO: 2140 - DNA, 16 bp, synthetic construct
  misc_feature 1..16: note = Synthetic construct
  source 1..16: mol_type = other DNA
gaaactcagggtgtgt

SEQ ID NO: 2141 - DNA, 16 bp, synthetic construct
  misc_feature 1..16: note = Synthetic construct
  source 1..16: mol_type = other DNA
tcggtaatcctgcagg

SEQ ID NO: 2142 - DNA, 16 bp, synthetic construct
  misc_feature 1..16: note = Synthetic construct
  source 1..16: mol_type = other DNA
cgatgtatcctttaca

SEQ ID NO: 2143 - DNA, 16 bp, synthetic construct
  misc_feature 1..16: note = Synthetic construct
  source 1..16: mol_type = other DNA
tacttacaggtgctag

SEQ ID NO: 2144 - DNA, 16 bp, synthetic construct
  misc_feature 1..16: note = Synthetic construct
  source 1..16: mol_type = other DNA
tttatgcgtacttctt

SEQ ID NO: 2145 - DNA, 16 bp, synthetic construct
  misc_feature 1..16: note = Synthetic construct
  source 1..16: mol_type = other DNA
atcgagtcaggacgta

SEQ ID NO: 2146 - DNA, 16 bp, synthetic construct
  misc_feature 1..16: note = Synthetic construct
  source 1..16: mol_type = other DNA
gactaacgttaaagac

SEQ ID NO: 2147 - DNA, 16 bp, synthetic construct
  misc_feature 1..16: note = Synthetic construct
  source 1..16: mol_type = other DNA
gatgaaatccacgtgg

SEQ ID NO: 2148 - DNA, 16 bp, synthetic construct
  misc_feature 1..16: note = Synthetic construct
  source 1..16: mol_type = other DNA
cgaccttaggctaggt

SEQ ID NO: 2149 - DNA, 16 bp, synthetic construct
  misc_feature 1..16: note = Synthetic construct
  source 1..16: mol_type = other DNA
tgcgtggcatagaaac

SEQ ID NO: 2150 - DNA, 16 bp, synthetic construct
  misc_feature 1..16: note = Synthetic construct
  source 1..16: mol_type = other DNA
ggacagatccctaatt

SEQ ID NO: 2151 - DNA, 16 bp, synthetic construct
  misc_feature 1..16: note = Synthetic construct
  source 1..16: mol_type = other DNA
agagtgggtctggtcg

SEQ ID NO: 2152 - DNA, 16 bp, synthetic construct
  misc_feature 1..16: note = Synthetic construct
  source 1..16: mol_type = other DNA
ctcattacatccgcga

SEQ ID NO: 2153 - DNA, 16 bp, synthetic construct
  misc_feature 1..16: note = Synthetic construct
  source 1..16: mol_type = other DNA
tctattgcactgccag

SEQ ID NO: 2154 - DNA, 16 bp, synthetic construct
  misc_feature 1..16: note = Synthetic construct
  source 1..16: mol_type = other DNA
aaggttccagttcatg

SEQ ID NO: 2155 - DNA, 16 bp, synthetic construct
  misc_feature 1..16: note = Synthetic construct
  source 1..16: mol_type = other DNA
tgctacccaagtagta

SEQ ID NO: 2156 - DNA, 16 bp, synthetic construct
  misc_feature 1..16: note = Synthetic construct
  source 1..16: mol_type = other DNA
ttgtaggcacggtaga

SEQ ID NO: 2157 - DNA, 16 bp, synthetic construct
  misc_feature 1..16: note = Synthetic construct
  source 1..16: mol_type = other DNA
agtgtcaagttaggta

SEQ ID NO: 2158 - DNA, 16 bp, synthetic construct
  misc_feature 1..16: note = Synthetic construct
  source 1..16: mol_type = other DNA
ggacattcaatccgat

SEQ ID NO: 2159 - DNA, 16 bp, synthetic construct
  misc_feature 1..16: note = Synthetic construct
  source 1..16: mol_type = other DNA
ccagcgagtaagagga

SEQ ID NO: 2160 - DNA, 16 bp, synthetic construct
  misc_feature 1..16: note = Synthetic construct
  source 1..16: mol_type = other DNA
gggtctggtggacgat

SEQ ID NO: 2161 - DNA, 16 bp, synthetic construct
  misc_feature 1..16: note = Synthetic construct
  source 1..16: mol_type = other DNA
ttagttcgtaggctga

SEQ ID NO: 2162 - DNA, 16 bp, synthetic construct
  misc_feature 1..16: note = Synthetic construct
  source 1..16: mol_type = other DNA
ctcggaggtcttgtcc

SEQ ID NO: 2163 - DNA, 16 bp, synthetic construct
  misc_feature 1..16: note = Synthetic construct
  source 1..16: mol_type = other DNA
actatctcagggttag

SEQ ID NO: 2164 - DNA, 16 bp, synthetic construct
  misc_feature 1..16: note = Synthetic construct
  source 1..16: mol_type = other DNA
aaggagctcttgagac

SEQ ID NO: 2165 - DNA, 16 bp, synthetic construct
  misc_feature 1..16: note = Synthetic construct
  source 1..16: mol_type = other DNA
ctcacactcctgcagg

SEQ ID NO: 2166 - DNA, 16 bp, synthetic construct
  misc_feature 1..16: note = Synthetic construct
  source 1..16: mol_type = other DNA
atccaccaggatgtat

SEQ ID NO: 2167 - DNA, 16 bp, synthetic construct
  misc_feature 1..16: note = Synthetic construct
  source 1..16: mol_type = other DNA
gttctcgtcggcgcat

SEQ ID NO: 2168 - DNA, 16 bp, synthetic construct
  misc_feature 1..16: note = Synthetic construct
  source 1..16: mol_type = other DNA
gctctgttctccaggg

SEQ ID NO: 2169 - DNA, 16 bp, synthetic construct
  misc_feature 1..16: note = Synthetic construct
  source 1..16: mol_type = other DNA
tacttactcggttcgg

SEQ ID NO: 2170 - DNA, 16 bp, synthetic construct
  misc_feature 1..16: note = Synthetic construct
  source 1..16: mol_type = other DNA
atttctgaggcccgtt

SEQ ID NO: 2171 - DNA, 16 bp, synthetic construct
  misc_feature 1..16: note = Synthetic construct
  source 1..16: mol_type = other DNA
gctgggtcacatgact

SEQ ID NO: 2172 - DNA, 16 bp, synthetic construct
  misc_feature 1..16: note = Synthetic construct
  source 1..16: mol_type = other DNA
acgtcaatccaagccg

SEQ ID NO: 2173 - DNA, 16 bp, synthetic construct
  misc_feature 1..16: note = Synthetic construct
  source 1..16: mol_type = other DNA
gactacacaaagcaat

SEQ ID NO: 2174 - DNA, 16 bp, synthetic construct
  misc_feature 1..16: note = Synthetic construct
  source 1..16: mol_type = other DNA
gtcctcaagggagtaa

SEQ ID NO: 2175 - DNA, 16 bp, synthetic construct
  misc_feature 1..16: note = Synthetic construct
  source 1..16: mol_type = other DNA
cctagcttctccggtt

SEQ ID NO: 2176 - DNA, 16 bp, synthetic construct
  misc_feature 1..16: note = Synthetic construct
  source 1..16: mol_type = other DNA
atcatggcatcctaga

SEQ ID NO: 2177 - DNA, 16 bp, synthetic construct
  misc_feature 1..16: note = Synthetic construct
  source 1..16: mol_type = other DNA
aggtcatagggtcgat

SEQ ID NO: 2178 - DNA, 16 bp, synthetic construct
  misc_feature 1..16: note = Synthetic construct
  source 1..16: mol_type = other DNA
agtgtcacagacgtag

SEQ ID NO: 2179 - DNA, 16 bp, synthetic construct
  misc_feature 1..16: note = Synthetic construct
  source 1..16: mol_type = other DNA
gtcaagtagacaaagg

SEQ ID NO: 2180 - DNA, 16 bp, synthetic construct
  misc_feature 1..16: note = Synthetic construct
  source 1..16: mol_type = other DNA
agcggtctcctgccat

SEQ ID NO: 2181 - DNA, 16 bp, synthetic construct
  misc_feature 1..16: note = Synthetic construct
  source 1..16: mol_type = other DNA
acatacgagtctcctc

SEQ ID NO: 2182 - DNA, 16 bp, synthetic construct
  misc_feature 1..16: note = Synthetic construct
  source 1..16: mol_type = other DNA
gggttgctcgtctgaa

SEQ ID NO: 2183 - DNA, 16 bp, synthetic construct
  misc_feature 1..16: note = Synthetic construct
  source 1..16: mol_type = other DNA
gttacagcaagttgtc

SEQ ID NO: 2184 - DNA, 16 bp, synthetic construct
  misc_feature 1..16: note = Synthetic construct
  source 1..16: mol_type = other DNA
gattcagagcagatcg

SEQ ID NO: 2185 - DNA, 16 bp, synthetic construct
  misc_feature 1..16: note = Synthetic construct
  source 1..16: mol_type = other DNA
ccgtggaagctggaac

SEQ ID NO: 2186 - DNA, 16 bp, synthetic construct
  misc_feature 1..16: note = Synthetic construct
  source 1..16: mol_type = other DNA
aaagtagcacaagccc

SEQ ID NO: 2187 - DNA, 16 bp, synthetic construct
  misc_feature 1..16: note = Synthetic construct
  source 1..16: mol_type = other DNA
cagaatcagtagtgcg

SEQ ID NO: 2188 - DNA, 16 bp, synthetic construct
  misc_feature 1..16: note = Synthetic construct
  source 1..16: mol_type = other DNA
acccactcagctgtgc

SEQ ID NO: 2189 - DNA, 16 bp, synthetic construct
  misc_feature 1..16: note = Synthetic construct
  source 1..16: mol_type = other DNA
caagatctcggaggta

SEQ ID NO: 2190 - DNA, 16 bp, synthetic construct
  misc_feature 1..16: note = Synthetic construct
  source 1..16: mol_type = other DNA
caggtgctcggccgat

SEQ ID NO: 2191 - DNA, 16 bp, synthetic construct
  misc_feature 1..16: note = Synthetic construct
  source 1..16: mol_type = other DNA
cggttaaagtttcctt

SEQ ID NO: 2192 - DNA, 16 bp, synthetic construct
  misc_feature 1..16: note = Synthetic construct
  source 1..16: mol_type = other DNA
ctacattgtagaagga

SEQ ID NO: 2193 - DNA, 16 bp, synthetic construct
  misc_feature 1..16: note = Synthetic construct
  source 1..16: mol_type = other DNA
ctcacacgtggtgtag

SEQ ID NO: 2194 - DNA, 16 bp, synthetic construct
  misc_feature 1..16: note = Synthetic construct
  source 1..16: mol_type = other DNA
gctcctaagcctcgtg

SEQ ID NO: 2195 - DNA, 16 bp, synthetic construct
  misc_feature 1..16: note = Synthetic construct
  source 1..16: mol_type = other DNA
ggctggtgtcgattgt

SEQ ID NO: 2196 - DNA, 16 bp, synthetic construct
  misc_feature 1..16: note = Synthetic construct
  source 1..16: mol_type = other DNA
ggtgaaggttccggca

SEQ ID NO: 2197 - DNA, 16 bp, synthetic construct
  misc_feature 1..16: note = Synthetic construct
  source 1..16: mol_type = other DNA
gtgcagctcaactctt

SEQ ID NO: 2198 - DNA, 16 bp, synthetic construct
  misc_feature 1..16: note = Synthetic construct
  source 1..16: mol_type = other DNA
gtgttagcacttctgc

SEQ ID NO: 2199 - DNA, 16 bp, synthetic construct
  misc_feature 1..16: note = Synthetic construct
  source 1..16: mol_type = other DNA
tacagtgtcgcgtttc

SEQ ID NO: 2200 - DNA, 16 bp, synthetic construct
  misc_feature 1..16: note = Synthetic construct
  source 1..16: mol_type = other DNA
tggttagtcattatcc

SEQ ID NO: 2201 - DNA, 16 bp, synthetic construct
  misc_feature 1..16: note = Synthetic construct
  source 1..16: mol_type = other DNA
ttcttagaggagttta

SEQ ID NO: 2202 - DNA, 16 bp, synthetic construct
  misc_feature 1..16: note = Synthetic construct
  source 1..16: mol_type = other DNA
gtgaaggcagtggagt

SEQ ID NO: 2203 - DNA, 16 bp, synthetic construct
  misc_feature 1..16: note = Synthetic construct
  source 1..16: mol_type = other DNA
cacacaacaattgctg

SEQ ID NO: 2204 - DNA, 16 bp, synthetic construct
  misc_feature 1..16: note = Synthetic construct
  source 1..16: mol_type = other DNA
gcaatcagttccggca

SEQ ID NO: 2205 - DNA, 16 bp, synthetic construct
  misc_feature 1..16: note = Synthetic construct
  source 1..16: mol_type = other DNA
caccttgtctgaaaga

SEQ ID NO: 2206 - DNA, 16 bp, synthetic construct
  misc_feature 1..16: note = Synthetic construct
  source 1..16: mol_type = other DNA
ccagcgatcgtagatc

SEQ ID NO: 2207 - DNA, 16 bp, synthetic construct
  misc_feature 1..16: note = Synthetic construct
  source 1..16: mol_type = other DNA
gaataagtcttctggc

SEQ ID NO: 2208 - DNA, 16 bp, synthetic construct
  misc_feature 1..16: note = Synthetic construct
  source 1..16: mol_type = other DNA
ctctggtgtcaatgtc

SEQ ID NO: 2209 - DNA, 16 bp, synthetic construct
  misc_feature 1..16: note = Synthetic construct
  source 1..16: mol_type = other DNA
accagtatcagttgac

SEQ ID NO: 2210 - DNA, 16 bp, synthetic construct
  misc_feature 1..16: note = Synthetic construct
  source 1..16: mol_type = other DNA
tgtcccacacgctttc

SEQ ID NO: 2211 - DNA, 16 bp, synthetic construct
  misc_feature 1..16: note = Synthetic construct
  source 1..16: mol_type = other DNA
cttaggagtgcaacga

SEQ ID NO: 2212 - DNA, 16 bp, synthetic construct
  misc_feature 1..16: note = Synthetic construct
  source 1..16: mol_type = other DNA
gaggtgacaatggtct

SEQ ID NO: 2213 - DNA, 16 bp, synthetic construct
  misc_feature 1..16: note = Synthetic construct
  source 1..16: mol_type = other DNA
gcaaacttcagcctaa

SEQ ID NO: 2214 - DNA, 16 bp, synthetic construct
  misc_feature 1..16: note = Synthetic construct
  source 1..16: mol_type = other DNA
cttaccgtcagtcagt

SEQ ID NO: 2215 - DNA, 16 bp, synthetic construct
  misc_feature 1..16: note = Synthetic construct
  source 1..16: mol_type = other DNA
gcgaccacactgaagg

SEQ ID NO: 2216 - DNA, 16 bp, synthetic construct
  misc_feature 1..16: note = Synthetic construct
  source 1..16: mol_type = other DNA
cttaactcagatgggt

SEQ ID NO: 2217 - DNA, 16 bp, synthetic construct
  misc_feature 1..16: note = Synthetic construct
  source 1..16: mol_type = other DNA
catcgaatcatcaccc

SEQ ID NO: 2218 - DNA, 16 bp, synthetic construct
  misc_feature 1..16: note = Synthetic construct
  source 1..16: mol_type = other DNA
ccatgtcgtgcgatag

SEQ ID NO: 2219 - DNA, 16 bp, synthetic construct
  misc_feature 1..16: note = Synthetic construct
  source 1..16: mol_type = other DNA
cctacactcagtccct

SEQ ID NO: 2220 - DNA, 16 bp, synthetic construct
  misc_feature 1..16: note = Synthetic construct
  source 1..16: mol_type = other DNA
tctattgtcttatctg

SEQ ID NO: 2221 - DNA, 16 bp, synthetic construct
  misc_feature 1..16: note = Synthetic construct
  source 1..16: mol_type = other DNA
ttaggcaagaactgta

SEQ ID NO: 2222 - DNA, 16 bp, synthetic construct
  misc_feature 1..16: note = Synthetic construct
  source 1..16: mol_type = other DNA
tgcgcaggtgcggtaa

SEQ ID NO: 2223 - DNA, 16 bp, synthetic construct
  misc_feature 1..16: note = Synthetic construct
  source 1..16: mol_type = other DNA
gtgaaggtcgttacga

SEQ ID NO: 2224 - DNA, 16 bp, synthetic construct
  misc_feature 1..16: note = Synthetic construct
  source 1..16: mol_type = other DNA
gggcatccagcatgag

SEQ ID NO: 2225 - DNA, 16 bp, synthetic construct
  misc_feature 1..16: note = Synthetic construct
  source 1..16: mol_type = other DNA
gaacctatccaaatgc

SEQ ID NO: 2226 - DNA, 16 bp, synthetic construct
  misc_feature 1..16: note = Synthetic construct
  source 1..16: mol_type = other DNA
gcaaactgtctcttta

SEQ ID NO: 2227 - DNA, 16 bp, synthetic construct
  misc_feature 1..16: note = Synthetic construct
  source 1..16: mol_type = other DNA
ggctcgatcaggcgaa

SEQ ID NO: 2228 - DNA, 16 bp, synthetic construct
  misc_feature 1..16: note = Synthetic construct
  source 1..16: mol_type = other DNA
gttctcgtccggcaca

SEQ ID NO: 2229 - DNA, 16 bp, synthetic construct
  misc_feature 1..16: note = Synthetic construct
  source 1..16: mol_type = other DNA
attggacagctaccgc

SEQ ID NO: 2230 - DNA, 16 bp, synthetic construct
  misc_feature 1..16: note = Synthetic construct
  source 1..16: mol_type = other DNA
gatcagtgttgattgc

SEQ ID NO: 2231 - DNA, 16 bp, synthetic construct
  misc_feature 1..16: note = Synthetic construct
  source 1..16: mol_type = other DNA
ctacattgttccacaa

SEQ ID NO: 2232 - DNA, 16 bp, synthetic construct
  misc_feature 1..16: note = Synthetic construct
  source 1..16: mol_type = other DNA
aacacgtcaatggaat

SEQ ID NO: 2233 - DNA, 16 bp, synthetic construct
  misc_feature 1..16: note = Synthetic construct
  source 1..16: mol_type = other DNA
ccttacgtccagtatg

SEQ ID NO: 2234 - DNA, 16 bp, synthetic construct
  misc_feature 1..16: note = Synthetic construct
  source 1..16: mol_type = other DNA
aactggtagacctagg

SEQ ID NO: 2235 - DNA, 16 bp, synthetic construct
  misc_feature 1..16: note = Synthetic construct
  source 1..16: mol_type = other DNA
gaagcagcacgtcagc

SEQ ID NO: 2236 - DNA, 16 bp, synthetic construct
  misc_feature 1..16: note = Synthetic construct
  source 1..16: mol_type = other DNA
aacgttgcagtgacag

SEQ ID NO: 2237 - DNA, 16 bp, synthetic construct
  misc_feature 1..16: note = Synthetic construct
  source 1..16: mol_type = other DNA
cgagaaggtatctgca

SEQ ID NO: 2238 - DNA, 16 bp, synthetic construct
  misc_feature 1..16: note = Synthetic construct
  source 1..16: mol_type = other DNA
ctgataggtggcccta

SEQ ID NO: 2239 - DNA, 16 bp, synthetic construct
  misc_feature 1..16: note = Synthetic construct
  source 1..16: mol_type = other DNA
gggaatgtcgccagca

SEQ ID NO: 2240 - DNA, 16 bp, synthetic construct
  misc_feature 1..16: note = Synthetic construct
  source 1..16: mol_type = other DNA
aaccgcggtatagtag

SEQ ID NO: 2241 - DNA, 16 bp, synthetic construct
  misc_feature 1..16: note = Synthetic construct
  source 1..16: mol_type = other DNA
tcgcgttcagggattg

SEQ ID NO: 2242 - DNA, 16 bp, synthetic construct
  misc_feature 1..16: note = Synthetic construct
  source 1..16: mol_type = other DNA
tcaggattcatcattc

SEQ ID NO: 2243 - DNA, 16 bp, synthetic construct
  misc_feature 1..16: note = Synthetic construct
  source 1..16: mol_type = other DNA
agcgtatcatctatgg

SEQ ID NO: 2244 - DNA, 16 bp, synthetic construct
  misc_feature 1..16: note = Synthetic construct
  source 1..16: mol_type = other DNA
gtgttaggtatgaaac

SEQ ID NO: 2245 - DNA, 16 bp, synthetic construct
  misc_feature 1..16: note = Synthetic construct
  source 1..16: mol_type = other DNA
acgccagcaagttgtc

SEQ ID NO: 2246 - DNA, 16 bp, synthetic construct
  misc_feature 1..16: note = Synthetic construct
  source 1..16: mol_type = other DNA
ccacctatcttgggta

SEQ ID NO: 2247 - DNA, 16 bp, synthetic construct
  misc_feature 1..16: note = Synthetic construct
  source 1..16: mol_type = other DNA
tactcgcgttctcatt

SEQ ID NO: 2248 - DNA, 16 bp, synthetic construct
  misc_feature 1..16: note = Synthetic construct
  source 1..16: mol_type = other DNA
ctgctgtgtagtacct

SEQ ID NO: 2249 - DNA, 16 bp, synthetic construct
  misc_feature 1..16: note = Synthetic construct
  source 1..16: mol_type = other DNA
agggagtagaaggaca

SEQ ID NO: 2250 - DNA, 16 bp, synthetic construct
  misc_feature 1..16: note = Synthetic construct
  source 1..16: mol_type = other DNA
cggacactctcacatt

SEQ ID NO: 2251 - DNA, 16 bp, synthetic construct
  misc_feature 1..16: note = Synthetic construct
  source 1..16: mol_type = other DNA
tgtggtatcgtatcag

SEQ ID NO: 2252 - DNA, 16 bp, synthetic construct
  misc_feature 1..16: note = Synthetic construct
  source 1..16: mol_type = other DNA
acatcagtctatcccg

SEQ ID NO: 2253 - DNA, 16 bp, synthetic construct
  misc_feature 1..16: note = Synthetic construct
  source 1..16: mol_type = other DNA
cattcgcagtgaacgc

SEQ ID NO: 2254 - DNA, 16 bp, synthetic construct
  misc_feature 1..16: note = Synthetic construct
  source 1..16: mol_type = other DNA
attggtgtcacaacgt

SEQ ID NO: 2255 - DNA, 16 bp, synthetic construct
  misc_feature 1..16: note = Synthetic construct
  source 1..16: mol_type = other DNA
tgacggcgtcctcttg

SEQ ID NO: 2256 - DNA, 16 bp, synthetic construct
  misc_feature 1..16: note = Synthetic construct
  source 1..16: mol_type = other DNA
ctgtttaagtttagga

SEQ ID NO: 2257 - DNA, 16 bp, synthetic construct
  misc_feature 1..16: note = Synthetic construct
  source 1..16: mol_type = other DNA
gggagattcagctctc

SEQ ID NO: 2258 - DNA, 16 bp, synthetic construct
  misc_feature 1..16: note = Synthetic construct
  source 1..16: mol_type = other DNA
gagtccgtctgctgct

SEQ ID NO: 2259 - DNA, 16 bp, synthetic construct
  misc_feature 1..16: note = Synthetic construct
  source 1..16: mol_type = other DNA
tcacaagcatccaaca

SEQ ID NO: 2260 - DNA, 16 bp, synthetic construct
  misc_feature 1..16: note = Synthetic construct
  source 1..16: mol_type = other DNA
catgcctgtacttagc

SEQ ID NO: 2261 - DNA, 16 bp, synthetic construct
  misc_feature 1..16: note = Synthetic construct
  source 1..16: mol_type = other DNA
acatcaggttgagttc

SEQ ID NO: 2262 - DNA, 16 bp, synthetic construct
  misc_feature 1..16: note = Synthetic construct
  source 1..16: mol_type = other DNA
ctacacccacacagag

SEQ ID NO: 2263 - DNA, 16 bp, synthetic construct
  misc_feature 1..16: note = Synthetic construct
  source 1..16: mol_type = other DNA
agggtgaagcaatatg

SEQ ID NO: 2264 - DNA, 16 bp, synthetic construct
  misc_feature 1..16: note = Synthetic construct
  source 1..16: mol_type = other DNA
agacgtttcagcgacc

SEQ ID NO: 2265 - DNA, 16 bp, synthetic construct
  misc_feature 1..16: note = Synthetic construct
  source 1..16: mol_type = other DNA
ccagcgaagcgattct

SEQ ID NO: 2266 - DNA, 16 bp, synthetic construct
  misc_feature 1..16: note = Synthetic construct
  source 1..16: mol_type = other DNA
gcagttagtgcaggta

SEQ ID NO: 2267 - DNA, 16 bp, synthetic construct
  misc_feature 1..16: note = Synthetic construct
  source 1..16: mol_type = other DNA
ctcctaggtcgattgt

SEQ ID NO: 2268 - DNA, 16 bp, synthetic construct
  misc_feature 1..16: note = Synthetic construct
  source 1..16: mol_type = other DNA
aaggttcgtctctctg

SEQ ID NO: 2269 - DNA, 16 bp, synthetic construct
  misc_feature 1..16: note = Synthetic construct
  source 1..16: mol_type = other DNA
cctaccatcgtgacat

SEQ ID NO: 2270 - DNA, 16 bp, synthetic construct
  misc_feature 1..16: note = Synthetic construct
  source 1..16: mol_type = other DNA
gcttgaaagcatcatc

SEQ ID NO: 2271 - DNA, 16 bp, synthetic construct
  misc_feature 1..16: note = Synthetic construct
  source 1..16: mol_type = other DNA
tcttcggcacacatgt

SEQ ID NO: 2272 - DNA, 16 bp, synthetic construct
  misc_feature 1..16: note = Synthetic construct
  source 1..16: mol_type = other DNA
aactggtagtatgaca

SEQ ID NO: 2273 - DNA, 16 bp, synthetic construct
  misc_feature 1..16: note = Synthetic construct
  source 1..16: mol_type = other DNA
ggtgttatcagaggtg

SEQ ID NO: 2274 - DNA, 16 bp, synthetic construct
  misc_feature 1..16: note = Synthetic construct
  source 1..16: mol_type = other DNA
tactcgctcttaccgc

SEQ ID NO: 2275 - DNA, 16 bp, synthetic construct
  misc_feature 1..16: note = Synthetic construct
  source 1..16: mol_type = other DNA
cggagctaggcgacat

SEQ ID NO: 2276 - DNA, 16 bp, synthetic construct
  misc_feature 1..16: note = Synthetic construct
  source 1..16: mol_type = other DNA
acgagcccagatgagc

SEQ ID NO: 2277 - DNA, 16 bp, synthetic construct
  misc_feature 1..16: note = Synthetic construct
  source 1..16: mol_type = other DNA
actgagtgtgaggcta

SEQ ID NO: 2278 - DNA, 16 bp, synthetic construct
  misc_feature 1..16: note = Synthetic construct
  source 1..16: mol_type = other DNA
gagtccgagaaacgcc

SEQ ID NO: 2279 - DNA, 16 bp, synthetic construct
  misc_feature 1..16: note = Synthetic construct
  source 1..16: mol_type = other DNA
gcatgtaagctaggca

SEQ ID NO: 2280 - DNA, 16 bp, synthetic construct
  misc_feature 1..16: note = Synthetic construct
  source 1..16: mol_type = other DNA
acgccgacacccatgg

SEQ ID NO: 2281 - DNA, 16 bp, synthetic construct
  misc_feature 1..16: note = Synthetic construct
  source 1..16: mol_type = other DNA
atcacgatcacatgca

SEQ ID NO: 2282 - DNA, 16 bp, synthetic construct
  misc_feature 1..16: note = Synthetic construct
  source 1..16: mol_type = other DNA
attatcctctgcagta

SEQ ID NO: 2283 - DNA, 16 bp, synthetic construct
  misc_feature 1..16: note = Synthetic construct
  source 1..16: mol_type = other DNA
ccacggacatgtcctc

SEQ ID NO: 2284 - DNA, 16 bp, synthetic construct
  misc_feature 1..16: note = Synthetic construct
  source 1..16: mol_type = other DNA
acggagatcatgtagc

SEQ ID NO: 2285 - DNA, 16 bp, synthetic construct
  misc_feature 1..16: note = Synthetic construct
  source 1..16: mol_type = other DNA
tagaccatccgatatg

SEQ ID NO: 2286 - DNA, 16 bp, synthetic construct
  misc_feature 1..16: note = Synthetic construct
  source 1..16: mol_type = other DNA
tgagaggtcgcgtttc

SEQ ID NO: 2287 - DNA, 16 bp, synthetic construct
  misc_feature 1..16: note = Synthetic construct
  source 1..16: mol_type = other DNA
ttgccgtcaatcacac

SEQ ID NO: 2288 - DNA, 16 bp, synthetic construct
  misc_feature 1..16: note = Synthetic construct
  source 1..16: mol_type = other DNA
catccactctccaacc

SEQ ID NO: 2289 - DNA, 16 bp, synthetic construct
  misc_feature 1..16: note = Synthetic construct
  source 1..16: mol_type = other DNA
catatggagtgggttg

SEQ ID NO: 2290 - DNA, 16 bp, synthetic construct
  misc_feature 1..16: note = Synthetic construct
  source 1..16: mol_type = other DNA
tctggaaagccacctg

SEQ ID NO: 2291 - DNA, 16 bp, synthetic construct
  misc_feature 1..16: note = Synthetic construct
  source 1..16: mol_type = other DNA
gggcactagagtgacc

SEQ ID NO: 2292 - DNA, 16 bp, synthetic construct
  misc_feature 1..16: note = Synthetic construct
  source 1..16: mol_type = other DNA
tcgaggcgtctgcaat

SEQ ID NO: 2293 - DNA, 16 bp, synthetic construct
  misc_feature 1..16: note = Synthetic construct
  source 1..16: mol_type = other DNA
caagatcagctaactc

SEQ ID NO: 2294 - DNA, 16 bp, synthetic construct
  misc_feature 1..16: note = Synthetic construct
  source 1..16: mol_type = other DNA
cgtagcgtccgtcatc

SEQ ID NO: 2295 - DNA, 16 bp, synthetic construct
  misc_feature 1..16: note = Synthetic construct
  source 1..16: mol_type = other DNA
caggtgcagataggag

SEQ ID NO: 2296 - DNA, 16 bp, synthetic construct
  misc_feature 1..16: note = Synthetic construct
  source 1..16: mol_type = other DNA
cgtgtctagtagccga

SEQ ID NO: 2297 - DNA, 16 bp, synthetic construct
  misc_feature 1..16: note = Synthetic construct
  source 1..16: mol_type = other DNA
cctaaagtctagcaca

SEQ ID NO: 2298 - DNA, 16 bp, synthetic construct
  misc_feature 1..16: note = Synthetic construct
  source 1..16: mol_type = other DNA
caagttgcacacagag

SEQ ID NO: 2299 - DNA, 16 bp, synthetic construct
  misc_feature 1..16: note = Synthetic construct
  source 1..16: mol_type = other DNA
ctacatttccacgtgg

SEQ ID NO: 2300 - DNA, 16 bp, synthetic construct
  misc_feature 1..16: note = Synthetic construct
  source 1..16: mol_type = other DNA
tttggttcaaagcaat

SEQ ID NO: 2301 - DNA, 16 bp, synthetic construct
  misc_feature 1..16: note = Synthetic construct
  source 1..16: mol_type = other DNA
ttgaacgtcccaggtg

SEQ ID NO: 2302 - DNA, 16 bp, synthetic construct
  misc_feature 1..16: note = Synthetic construct
  source 1..16: mol_type = other DNA
gtgcttcgtacagtgg

SEQ ID NO: 2303 - DNA, 16 bp, synthetic construct
  misc_feature 1..16: note = Synthetic construct
  source 1..16: mol_type = other DNA
tcaggtatcatgtagc

SEQ ID NO: 2304 - DNA, 16 bp, synthetic construct
  misc_feature 1..16: note = Synthetic construct
  source 1..16: mol_type = other DNA
ttatgctagcagactg

SEQ ID NO: 2305 - DNA, 16 bp, synthetic construct
  misc_feature 1..16: note = Synthetic construct
  source 1..16: mol_type = other DNA
acgtcaacacatttct

SEQ ID NO: 2306 - DNA, 16 bp, synthetic construct
  misc_feature 1..16: note = Synthetic construct
  source 1..16: mol_type = other DNA
tcttcggcaagacgtg

SEQ ID NO: 2307 - DNA, 16 bp, synthetic construct
  misc_feature 1..16: note = Synthetic construct
  source 1..16: mol_type = other DNA
agcctaacaagccgtc

SEQ ID NO: 2308 - DNA, 16 bp, synthetic construct
  misc_feature 1..16: note = Synthetic construct
  source 1..16: mol_type = other DNA
agggatggttccactc

SEQ ID NO: 2309 - DNA, 16 bp, synthetic construct
  misc_feature 1..16: note = Synthetic construct
  source 1..16: mol_type = other DNA
aggtccggtagctccg

SEQ ID NO: 2310 - DNA, 16 bp, synthetic construct
  misc_feature 1..16: note = Synthetic construct
  source 1..16: mol_type = other DNA
gggatgaagtgaagag

SEQ ID NO: 2311 - DNA, 16 bp, synthetic construct
  misc_feature 1..16: note = Synthetic construct
  source 1..16: mol_type = other DNA
ccatgtccaagttaag

SEQ ID NO: 2312 - DNA, 16 bp, synthetic construct
  misc_feature 1..16: note = Synthetic construct
  source 1..16: mol_type = other DNA
agatctgtcagcgatt

SEQ ID NO: 2313 - DNA, 16 bp, synthetic construct
  misc_feature 1..16: note = Synthetic construct
  source 1..16: mol_type = other DNA
agcagccagaaaccat

SEQ ID NO: 2314 - DNA, 16 bp, synthetic construct
  misc_feature 1..16: note = Synthetic construct
  source 1..16: mol_type = other DNA
tactcgcagtgtccat

SEQ ID NO: 2315 - DNA, 16 bp, synthetic construct
  misc_feature 1..16: note = Synthetic construct
  source 1..16: mol_type = other DNA
aaatgccagccctaat

SEQ ID NO: 2316 - DNA, 16 bp, synthetic construct
  misc_feature 1..16: note = Synthetic construct
  source 1..16: mol_type = other DNA
ttaggcacatccgcga

SEQ ID NO: 2317 - DNA, 16 bp, synthetic construct
  misc_feature 1..16: note = Synthetic construct
  source 1..16: mol_type = other DNA
tcagctccacaccgca

SEQ ID NO: 2318 - DNA, 16 bp, synthetic construct
  misc_feature 1..16: note = Synthetic construct
  source 1..16: mol_type = other DNA
catcagacacggctac

SEQ ID NO: 2319 - DNA, 16 bp, synthetic construct
  misc_feature 1..16: note = Synthetic construct
  source 1..16: mol_type = other DNA
tgctgctgtagctccg

SEQ ID NO: 2320 - DNA, 16 bp, synthetic construct
  misc_feature 1..16: note = Synthetic construct
  source 1..16: mol_type = other DNA
gtcttcgaggaccaca

SEQ ID NO: 2321 - DNA, 16 bp, synthetic construct
  misc_feature 1..16: note = Synthetic construct
  source 1..16: mol_type = other DNA
ctcgggaagctgaaat

SEQ ID NO: 2322 - DNA, 16 bp, synthetic construct
  misc_feature 1..16: note = Synthetic construct
  source 1..16: mol_type = other DNA
cacactcgttcacggc

SEQ ID NO: 2323 - DNA, 16 bp, synthetic construct
  misc_feature 1..16: note = Synthetic construct
  source 1..16: mol_type = other DNA
tggttcctcccattta

SEQ ID NO: 2324 - DNA, 16 bp, synthetic construct
  misc_feature 1..16: note = Synthetic construct
  source 1..16: mol_type = other DNA
ggacagacaatggtct

SEQ ID NO: 2325 - DNA, 16 bp, synthetic construct
  misc_feature 1..16: note = Synthetic construct
  source 1..16: mol_type = other DNA
ccatgtccaatggagc

SEQ ID NO: 2326 - DNA, 16 bp, synthetic construct
  misc_feature 1..16: note = Synthetic construct
  source 1..16: mol_type = other DNA
tgactagtcggaaacg

SEQ ID NO: 2327 - DNA, 16 bp, synthetic construct
  misc_feature 1..16: note = Synthetic construct
  source 1..16: mol_type = other DNA
ctgcggatcggagcaa

SEQ ID NO: 2328 - DNA, 16 bp, synthetic construct
  misc_feature 1..16: note = Synthetic construct
  source 1..16: mol_type = other DNA
tcgcgagtcttgaggt

SEQ ID NO: 2329 - DNA, 16 bp, synthetic construct
  misc_feature 1..16: note = Synthetic construct
  source 1..16: mol_type = other DNA
acctttaagtctcggc

SEQ ID NO: 2330 - DNA, 16 bp, synthetic construct
  misc_feature 1..16: note = Synthetic construct
  source 1..16: mol_type = other DNA
tcagctctcaccctca

SEQ ID NO: 2331 - DNA, 16 bp, synthetic construct
  misc_feature 1..16: note = Synthetic construct
  source 1..16: mol_type = other DNA
ctctacgcacagcgtc

SEQ ID NO: 2332 - DNA, 16 bp, synthetic construct
  misc_feature 1..16: note = Synthetic construct
  source 1..16: mol_type = other DNA
cagctgggttcgggct

SEQ ID NO: 2333 - DNA, 16 bp, synthetic construct
  misc_feature 1..16: note = Synthetic construct
  source 1..16: mol_type = other DNA
aagccgcagagttggc

SEQ ID NO: 2334 - DNA, 16 bp, synthetic construct
  misc_feature 1..16: note = Synthetic construct
  source 1..16: mol_type = other DNA
acaccggtctcattca

SEQ ID NO: 2335 - DNA, 16 bp, synthetic construct
  misc_feature 1..16: note = Synthetic construct
  source 1..16: mol_type = other DNA
cacaccttcgatccct

SEQ ID NO: 2336 - DNA, 16 bp, synthetic construct
  misc_feature 1..16: note = Synthetic construct
  source 1..16: mol_type = other DNA
cgtgtaagtttcgctc

SEQ ID NO: 2337 - DNA, 16 bp, synthetic construct
  misc_feature 1..16: note = Synthetic construct
  source 1..16: mol_type = other DNA
cgagcacgtccatgat

SEQ ID NO: 2338 - DNA, 16 bp, synthetic construct
  misc_feature 1..16: note = Synthetic construct
  source 1..16: mol_type = other DNA
cccatactcttcggtc

SEQ ID NO: 2339 - DNA, 16 bp, synthetic construct
  misc_feature 1..16: note = Synthetic construct
  source 1..16: mol_type = other DNA
gcacatatccgtcatc

SEQ ID NO: 2340 - DNA, 16 bp, synthetic construct
  misc_feature 1..16: note = Synthetic construct
  source 1..16: mol_type = other DNA
ggaaagctcgaatggg

SEQ ID NO: 2341 - DNA, 16 bp, synthetic construct
  misc_feature 1..16: note = Synthetic construct
  source 1..16: mol_type = other DNA
ggaataagtcggatcc

SEQ ID NO: 2342 - DNA, 16 bp, synthetic construct
  misc_feature 1..16: note = Synthetic construct
  source 1..16: mol_type = other DNA
tttatgccaaaggcgt

SEQ ID NO: 2343 - DNA, 16 bp, synthetic construct
  misc_feature 1..16: note = Synthetic construct
  source 1..16: mol_type = other DNA
acatcagcatcagtac

SEQ ID NO: 2344 - DNA, 16 bp, synthetic construct
  misc_feature 1..16: note = Synthetic construct
  source 1..16: mol_type = other DNA
ttcccagtccctaacc

SEQ ID NO: 2345 - DNA, 16 bp, synthetic construct
  misc_feature 1..16: note = Synthetic construct
  source 1..16: mol_type = other DNA
gcagccaagtgggttg

SEQ ID NO: 2346 - DNA, 16 bp, synthetic construct
  misc_feature 1..16: note = Synthetic construct
  source 1..16: mol_type = other DNA
tgtggtatctgcaagt

SEQ ID NO: 2347 - DNA, 16 bp, synthetic construct
  misc_feature 1..16: note = Synthetic construct
  source 1..16: mol_type = other DNA
tgtcccacagggagag

SEQ ID NO: 2348 - DNA, 16 bp, synthetic construct
  misc_feature 1..16: note = Synthetic construct
  source 1..16: mol_type = other DNA
ataagaggtgcaactt

SEQ ID NO: 2349 - DNA, 16 bp, synthetic construct
  misc_feature 1..16: note = Synthetic construct
  source 1..16: mol_type = other DNA
agggagttcagaaatg

SEQ ID NO: 2350 - DNA, 16 bp, synthetic construct
  misc_feature 1..16: note = Synthetic construct
  source 1..16: mol_type = other DNA
ctcgaaaagtagtgcg

SEQ ID NO: 2351 - DNA, 16 bp, synthetic construct
  misc_feature 1..16: note = Synthetic construct
  source 1..16: mol_type = other DNA
acgatgttcttagccc

SEQ ID NO: 2352 - DNA, 16 bp, synthetic construct
  misc_feature 1..16: note = Synthetic construct
  source 1..16: mol_type = other DNA
gtgcttccacatcttt

SEQ ID NO: 2353 - DNA, 16 bp, synthetic construct
  misc_feature 1..16: note = Synthetic construct
  source 1..16: mol_type = other DNA
ttaggacgtcctagcg

SEQ ID NO: 2354 - DNA, 16 bp, synthetic construct
  misc_feature 1..16: note = Synthetic construct
  source 1..16: mol_type = other DNA
ataagagcaagaagag

SEQ ID NO: 2355 - DNA, 16 bp, synthetic construct
  misc_feature 1..16: note = Synthetic construct
  source 1..16: mol_type = other DNA
gctgcgatcgaggtag

SEQ ID NO: 2356 - DNA, 16 bp, synthetic construct
  misc_feature 1..16: note = Synthetic construct
  source 1..16: mol_type = other DNA
gtacgtacagatgagc

SEQ ID NO: 2357 - DNA, 16 bp, synthetic construct
  misc_feature 1..16: note = Synthetic construct
  source 1..16: mol_type = other DNA
cacacctgtcatatcg

SEQ ID NO: 2358 - DNA, 16 bp, synthetic construct
  misc_feature 1..16: note = Synthetic construct
  source 1..16: mol_type = other DNA
acgcagctccggcaca

SEQ ID NO: 2359 - DNA, 16 bp, synthetic construct
  misc_feature 1..16: note = Synthetic construct
  source 1..16: mol_type = other DNA
acttacttccctaacc

SEQ ID NO: 2360 - DNA, 16 bp, synthetic construct
  misc_feature 1..16: note = Synthetic construct
  source 1..16: mol_type = other DNA
agacgtttcctgcagg

SEQ ID NO: 2361 - DNA, 16 bp, synthetic construct
  misc_feature 1..16: note = Synthetic construct
  source 1..16: mol_type = other DNA
gaagcagagtgcaagc

SEQ ID NO: 2362 - DNA, 16 bp, synthetic construct
  misc_feature 1..16: note = Synthetic construct
  source 1..16: mol_type = other DNA
cctaaagtcgcgtttc

SEQ ID NO: 2363 - DNA, 16 bp, synthetic construct
  misc_feature 1..16: note = Synthetic construct
  source 1..16: mol_type = other DNA
ccttcgaagagcaatt

SEQ ID NO: 2364 - DNA, 16 bp, synthetic construct
  misc_feature 1..16: note = Synthetic construct
  source 1..16: mol_type = other DNA
taagagatcagtgcat

SEQ ID NO: 2365 - DNA, 16 bp, synthetic construct
  misc_feature 1..16: note = Synthetic construct
  source 1..16: mol_type = other DNA
taccttagtgaggcta

SEQ ID NO: 2366 - DNA, 16 bp, synthetic construct
  misc_feature 1..16: note = Synthetic construct
  source 1..16: mol_type = other DNA
tcgcgttgtatagggc

SEQ ID NO: 2367 - DNA, 16 bp, synthetic construct
  misc_feature 1..16: note = Synthetic construct
  source 1..16: mol_type = other DNA
agggatgagaatgttg

SEQ ID NO: 2368 - DNA, 16 bp, synthetic construct
  misc_feature 1..16: note = Synthetic construct
  source 1..16: mol_type = other DNA
atccgaagtgttcgat

SEQ ID NO: 2369 - DNA, 16 bp, synthetic construct
  misc_feature 1..16: note = Synthetic construct
  source 1..16: mol_type = other DNA
agcatacaggagttta

SEQ ID NO: 2370 - DNA, 16 bp, synthetic construct
  misc_feature 1..16: note = Synthetic construct
  source 1..16: mol_type = other DNA
agaatagtctccctga

SEQ ID NO: 2371 - DNA, 16 bp, synthetic construct
  misc_feature 1..16: note = Synthetic construct
  source 1..16: mol_type = other DNA
ccacctatcagaggtg

SEQ ID NO: 2372 - DNA, 16 bp, synthetic construct
  misc_feature 1..16: note = Synthetic construct
  source 1..16: mol_type = other DNA
gactgcgagcctatgt

SEQ ID NO: 2373 - DNA, 16 bp, synthetic construct
  misc_feature 1..16: note = Synthetic construct
  source 1..16: mol_type = other DNA
atccaccagtgaagtt

SEQ ID NO: 2374 - DNA, 16 bp, synthetic construct
  misc_feature 1..16: note = Synthetic construct
  source 1..16: mol_type = other DNA
catatggtccctcttt

SEQ ID NO: 2375 - DNA, 16 bp, synthetic construct
  misc_feature 1..16: note = Synthetic construct
  source 1..16: mol_type = other DNA
gagtccgtcgatgagg

SEQ ID NO: 2376 - DNA, 16 bp, synthetic construct
  misc_feature 1..16: note = Synthetic construct
  source 1..16: mol_type = other DNA
ggaataagtttcgctc

SEQ ID NO: 2377 - DNA, 16 bp, synthetic construct
  misc_feature 1..16: note = Synthetic construct
  source 1..16: mol_type = other DNA
acttgttgtagggact

SEQ ID NO: 2378 - DNA, 16 bp, synthetic construct
  misc_feature 1..16: note = Synthetic construct
  source 1..16: mol_type = other DNA
agcggtcgtgtgtgcc

SEQ ID NO: 2379 - DNA, 16 bp, synthetic construct
  misc_feature 1..16: note = Synthetic construct
  source 1..16: mol_type = other DNA
tctgagagtgggtatg

SEQ ID NO: 2380 - DNA, 16 bp, synthetic construct
  misc_feature 1..16: note = Synthetic construct
  source 1..16: mol_type = other DNA
aactggtagctcctct

SEQ ID NO: 2381 - DNA, 16 bp, synthetic construct
  misc_feature 1..16: note = Synthetic construct
  source 1..16: mol_type = other DNA
acttactgttgtacac

SEQ ID NO: 2382 - DNA, 16 bp, synthetic construct
  misc_feature 1..16: note = Synthetic construct
  source 1..16: mol_type = other DNA
gcctctatcggccgat

SEQ ID NO: 2383 - DNA, 16 bp, synthetic construct
  misc_feature 1..16: note = Synthetic construct
  source 1..16: mol_type = other DNA
ttgccgtcagcgtcca

SEQ ID NO: 2384 - DNA, 16 bp, synthetic construct
  misc_feature 1..16: note = Synthetic construct
  source 1..16: mol_type = other DNA
ggacagagttagggtg

SEQ ID NO: 2385 - DNA, 16 bp, synthetic construct
  misc_feature 1..16: note = Synthetic construct
  source 1..16: mol_type = other DNA
tgacggcagttatcgc

SEQ ID NO: 2386 - DNA, 16 bp, synthetic construct
  misc_feature 1..16: note = Synthetic construct
  source 1..16: mol_type = other DNA
tcattaccatcggaag

SEQ ID NO: 2387 - DNA, 16 bp, synthetic construct
  misc_feature 1..16: note = Synthetic construct
  source 1..16: mol_type = other DNA
atttctgtctgcccta

SEQ ID NO: 2388 - DNA, 16 bp, synthetic construct
  misc_feature 1..16: note = Synthetic construct
  source 1..16: mol_type = other DNA
acccactagtccgtat

SEQ ID NO: 2389 - DNA, 16 bp, synthetic construct
  misc_feature 1..16: note = Synthetic construct
  source 1..16: mol_type = other DNA
cggacgtgtggtaacg

SEQ ID NO: 2390 - DNA, 16 bp, synthetic construct
  misc_feature 1..16: note = Synthetic construct
  source 1..16: mol_type = other DNA
atttctggttgaggtg

SEQ ID NO: 2391 - DNA, 16 bp, synthetic construct
  misc_feature 1..16: note = Synthetic construct
  source 1..16: mol_type = other DNA
actgagttctatcgcc

SEQ ID NO: 2392 - DNA, 16 bp, synthetic construct
  misc_feature 1..16: note = Synthetic construct
  source 1..16: mol_type = other DNA
cacattttcttaccgc

SEQ ID NO: 2393 - DNA, 16 bp, synthetic construct
  misc_feature 1..16: note = Synthetic construct
  source 1..16: mol_type = other DNA
ttgccgttcacgcata

SEQ ID NO: 2394 - DNA, 16 bp, synthetic construct
  misc_feature 1..16: note = Synthetic construct
  source 1..16: mol_type = other DNA
acactgaagacttgaa

SEQ ID NO: 2395 - DNA, 16 bp, synthetic construct
  misc_feature 1..16: note = Synthetic construct
  source 1..16: mol_type = other DNA
gagtccgagatctgct

SEQ ID NO: 2396 - DNA, 16 bp, synthetic construct
  misc_feature 1..16: note = Synthetic construct
  source 1..16: mol_type = other DNA
gtgaaggtctgcccta

SEQ ID NO: 2397 - DNA, 16 bp, synthetic construct
  misc_feature 1..16: note = Synthetic construct
  source 1..16: mol_type = other DNA
gaaactccattgggcc

SEQ ID NO: 2398 - DNA, 16 bp, synthetic construct
  misc_feature 1..16: note = Synthetic construct
  source 1..16: mol_type = other DNA
atcatctagtggagaa

SEQ ID NO: 2399 - DNA, 16 bp, synthetic construct
  misc_feature 1..16: note = Synthetic construct
  source 1..16: mol_type = other DNA
tgagcatgtgcatcta

SEQ ID NO: 2400 - DNA, 16 bp, synthetic construct
  misc_feature 1..16: note = Synthetic construct
  source 1..16: mol_type = other DNA
ggatgtttctccaacc

SEQ ID NO: 2401 - DNA, 16 bp, synthetic construct
  misc_feature 1..16: note = Synthetic construct
  source 1..16: mol_type = other DNA
aactcagcaagctgga

SEQ ID NO: 2402 - DNA, 16 bp, synthetic construct
  misc_feature 1..16: note = Synthetic construct
  source 1..16: mol_type = other DNA
cacacctcatgctggc

SEQ ID NO: 2403 - DNA, 16 bp, synthetic construct
  misc_feature 1..16: note = Synthetic construct
  source 1..16: mol_type = other DNA
attggaccaatagagt

SEQ ID NO: 2404 - DNA, 16 bp, synthetic construct
  misc_feature 1..16: note = Synthetic construct
  source 1..16: mol_type = other DNA
aacacgtaggcccttg

SEQ ID NO: 2405 - DNA, 16 bp, synthetic construct
  misc_feature 1..16: note = Synthetic construct
  source 1..16: mol_type = other DNA
cgttggggttcgcgac

SEQ ID NO: 2406 - DNA, 16 bp, synthetic construct
  misc_feature 1..16: note = Synthetic construct
  source 1..16: mol_type = other DNA
gacgcgtagggatacc

SEQ ID NO: 2407 - DNA, 16 bp, synthetic construct
  misc_feature 1..16: note = Synthetic construct
  source 1..16: mol_type = other DNA
agcctaaaggcgctct

SEQ ID NO: 2408 - DNA, 16 bp, synthetic construct
  misc_feature 1..16: note = Synthetic construct
  source 1..16: mol_type = other DNA
gtgtgcgtcctatgtt

SEQ ID NO: 2409 - DNA, 16 bp, synthetic construct
  misc_feature 1..16: note = Synthetic construct
  source 1..16: mol_type = other DNA
acgggctcaggtctcg

SEQ ID NO: 2410 - DNA, 16 bp, synthetic construct
  misc_feature 1..16: note = Synthetic construct
  source 1..16: mol_type = other DNA
gtcttcgagtcaatag

SEQ ID NO: 2411 - DNA, 16 bp, synthetic construct
  misc_feature 1..16: note = Synthetic construct
  source 1..16: mol_type = other DNA
gcatgatagcgcttat

SEQ ID NO: 2412 - DNA, 16 bp, synthetic construct
  misc_feature 1..16: note = Synthetic construct
  source 1..16: mol_type = other DNA
gcctctagttgagttc

SEQ ID NO: 2413 - DNA, 16 bp, synthetic construct
  misc_feature 1..16: note = Synthetic construct
  source 1..16: mol_type = other DNA
ctagtgatccttcaat

SEQ ID NO: 2414 - DNA, 16 bp, synthetic construct
  misc_feature 1..16: note = Synthetic construct
  source 1..16: mol_type = other DNA
tgagcatgtgtcctct

SEQ ID NO: 2415 - DNA, 16 bp, synthetic construct
  misc_feature 1..16: note = Synthetic construct
  source 1..16: mol_type = other DNA
gcaatcacacttaagc

SEQ ID NO: 2416 - DNA, 16 bp, synthetic construct
  misc_feature 1..16: note = Synthetic construct
  source 1..16: mol_type = other DNA
ggccgatcatgttccc

SEQ ID NO: 2417 - DNA, 16 bp, synthetic construct
  misc_feature 1..16: note = Synthetic construct
  source 1..16: mol_type = other DNA
ctcggagcagcagttt

SEQ ID NO: 2418 - DNA, 16 bp, synthetic construct
  misc_feature 1..16: note = Synthetic construct
  source 1..16: mol_type = other DNA
aaatgcccacaacgtt

SEQ ID NO: 2419 - DNA, 16 bp, synthetic construct
  misc_feature 1..16: note = Synthetic construct
  source 1..16: mol_type = other DNA
gcatgattccacgacg

SEQ ID NO: 2420 - DNA, 16 bp, synthetic construct
  misc_feature 1..16: note = Synthetic construct
  source 1..16: mol_type = other DNA
ttgtaggagtcacgcc

SEQ ID NO: 2421 - DNA, 16 bp, synthetic construct
  misc_feature 1..16: note = Synthetic construct
  source 1..16: mol_type = other DNA
acagctaaggtgatta

SEQ ID NO: 2422 - DNA, 16 bp, synthetic construct
  misc_feature 1..16: note = Synthetic construct
  source 1..16: mol_type = other DNA
ctgaagtcactgccag

SEQ ID NO: 2423 - DNA, 16 bp, synthetic construct
  misc_feature 1..16: note = Synthetic construct
  source 1..16: mol_type = other DNA
acgatgttctactcat

SEQ ID NO: 2424 - DNA, 16 bp, synthetic construct
  misc_feature 1..16: note = Synthetic construct
  source 1..16: mol_type = other DNA
tttcctcgtacagttc

SEQ ID NO: 2425 - DNA, 16 bp, synthetic construct
  misc_feature 1..16: note = Synthetic construct
  source 1..16: mol_type = other DNA
attggtgaggacatta

SEQ ID NO: 2426 - DNA, 16 bp, synthetic construct
  misc_feature 1..16: note = Synthetic construct
  source 1..16: mol_type = other DNA
cctttctcagctggct

SEQ ID NO: 2427 - DNA, 16 bp, synthetic construct
  misc_feature 1..16: note = Synthetic construct
  source 1..16: mol_type = other DNA
acatggtcacatgact

SEQ ID NO: 2428 - DNA, 16 bp, synthetic construct
  misc_feature 1..16: note = Synthetic construct
  source 1..16: mol_type = other DNA
gccaaatagcgtcaag

SEQ ID NO: 2429 - DNA, 16 bp, synthetic construct
  misc_feature 1..16: note = Synthetic construct
  source 1..16: mol_type = other DNA
cgtcagggtaacgcga

SEQ ID NO: 2430 - DNA, 16 bp, synthetic construct
  misc_feature 1..16: note = Synthetic construct
  source 1..16: mol_type = other DNA
ctagccttccgaacgc

SEQ ID NO: 2431 - DNA, 16 bp, synthetic construct
  misc_feature 1..16: note = Synthetic construct
  source 1..16: mol_type = other DNA
gtttctatcgccaaat

SEQ ID NO: 2432 - DNA, 16 bp, synthetic construct
  misc_feature 1..16: note = Synthetic construct
  source 1..16: mol_type = other DNA
tacggtagtccagtta

SEQ ID NO: 2433 - DNA, 16 bp, synthetic construct
  misc_feature 1..16: note = Synthetic construct
  source 1..16: mol_type = other DNA
tgtattcgtctagtca

SEQ ID NO: 2434 - DNA, 16 bp, synthetic construct
  misc_feature 1..16: note = Synthetic construct
  source 1..16: mol_type = other DNA
cgttggggtaatcacc

SEQ ID NO: 2435 - DNA, 16 bp, synthetic construct
  misc_feature 1..16: note = Synthetic construct
  source 1..16: mol_type = other DNA
agttggtcacgttggc

SEQ ID NO: 2436 - DNA, 16 bp, synthetic construct
  misc_feature 1..16: note = Synthetic construct
  source 1..16: mol_type = other DNA
ccgtactcacgttggc

SEQ ID NO: 2437 - DNA, 16 bp, synthetic construct
  misc_feature 1..16: note = Synthetic construct
  source 1..16: mol_type = other DNA
gatgagggttatcacg

SEQ ID NO: 2438 - DNA, 16 bp, synthetic construct
  misc_feature 1..16: note = Synthetic construct
  source 1..16: mol_type = other DNA
aagtctgcatggatgg

SEQ ID NO: 2439 - DNA, 16 bp, synthetic construct
  misc_feature 1..16: note = Synthetic construct
  source 1..16: mol_type = other DNA
ctcgagggtctcttat

SEQ ID NO: 2440 - DNA, 16 bp, synthetic construct
  misc_feature 1..16: note = Synthetic construct
  source 1..16: mol_type = other DNA
tgtattcagcgaaggg

SEQ ID NO: 2441 - DNA, 16 bp, synthetic construct
  misc_feature 1..16: note = Synthetic construct
  source 1..16: mol_type = other DNA
tcttcggagcacacag

SEQ ID NO: 2442 - DNA, 16 bp, synthetic construct
  misc_feature 1..16: note = Synthetic construct
  source 1..16: mol_type = other DNA
tcatttgtcgtttatc

SEQ ID NO: 2443 - DNA, 16 bp, synthetic construct
  misc_feature 1..16: note = Synthetic construct
  source 1..16: mol_type = other DNA
cattcgcgtatagggc

SEQ ID NO: 2444 - DNA, 16 bp, synthetic construct
  misc_feature 1..16: note = Synthetic construct
  source 1..16: mol_type = other DNA
catattcagactacaa

SEQ ID NO: 2445 - DNA, 16 bp, synthetic construct
  misc_feature 1..16: note = Synthetic construct
  source 1..16: mol_type = other DNA
tttgtcatcactctta

SEQ ID NO: 2446 - DNA, 16 bp, synthetic construct
  misc_feature 1..16: note = Synthetic construct
  source 1..16: mol_type = other DNA
gcgagaaagtgccaga

SEQ ID NO: 2447 - DNA, 16 bp, synthetic construct
  misc_feature 1..16: note = Synthetic construct
  source 1..16: mol_type = other DNA
gcgcgattctccaggg

SEQ ID NO: 2448 - DNA, 16 bp, synthetic construct
  misc_feature 1..16: note = Synthetic construct
  source 1..16: mol_type = other DNA
cggctagcagagccaa

SEQ ID NO: 2449 - DNA, 16 bp, synthetic construct
  misc_feature 1..16: note = Synthetic construct
  source 1..16: mol_type = other DNA
cagagagaggctcatt

SEQ ID NO: 2450 - DNA, 16 bp, synthetic construct
  misc_feature 1..16: note = Synthetic construct
  source 1..16: mol_type = other DNA
gttaagccacaccgca

SEQ ID NO: 2451 - DNA, 16 bp, synthetic construct
  misc_feature 1..16: note = Synthetic construct
  source 1..16: mol_type = other DNA
atgggagagccggtaa

SEQ ID NO: 2452 - DNA, 16 bp, synthetic construct
  misc_feature 1..16: note = Synthetic construct
  source 1..16: mol_type = other DNA
tacggtaaggcacatg

SEQ ID NO: 2453 - DNA, 16 bp, synthetic construct
  misc_feature 1..16: note = Synthetic construct
  source 1..16: mol_type = other DNA
cctattagttcagtac

SEQ ID NO: 2454 - DNA, 16 bp, synthetic construct
  misc_feature 1..16: note = Synthetic construct
  source 1..16: mol_type = other DNA
tgctacctcctgcagg

SEQ ID NO: 2455 - DNA, 16 bp, synthetic construct
  misc_feature 1..16: note = Synthetic construct
  source 1..16: mol_type = other DNA
tacctatgttccacaa

SEQ ID NO: 2456 - DNA, 16 bp, synthetic construct
  misc_feature 1..16: note = Synthetic construct
  source 1..16: mol_type = other DNA
taagagagtccaacta

SEQ ID NO: 2457 - DNA, 16 bp, synthetic construct
  misc_feature 1..16: note = Synthetic construct
  source 1..16: mol_type = other DNA
ggcaattgtccgaacc

SEQ ID NO: 2458 - DNA, 16 bp, synthetic construct
  misc_feature 1..16: note = Synthetic construct
  source 1..16: mol_type = other DNA
ctcattatcattgcga

SEQ ID NO: 2459 - DNA, 16 bp, synthetic construct
  misc_feature 1..16: note = Synthetic construct
  source 1..16: mol_type = other DNA
tcattacgtggaaaga

SEQ ID NO: 2460 - DNA, 16 bp, synthetic construct
  misc_feature 1..16: note = Synthetic construct
  source 1..16: mol_type = other DNA
gcgagaagtccatcct

SEQ ID NO: 2461 - DNA, 16 bp, synthetic construct
  misc_feature 1..16: note = Synthetic construct
  source 1..16: mol_type = other DNA
attctactcctttcgg

SEQ ID NO: 2462 - DNA, 16 bp, synthetic construct
  misc_feature 1..16: note = Synthetic construct
  source 1..16: mol_type = other DNA
gatcagttcaacggcc

SEQ ID NO: 2463 - DNA, 16 bp, synthetic construct
  misc_feature 1..16: note = Synthetic construct
  source 1..16: mol_type = other DNA
agcttgatccgtagta

SEQ ID NO: 2464 - DNA, 16 bp, synthetic construct
  misc_feature 1..16: note = Synthetic construct
  source 1..16: mol_type = other DNA
aactcttagctgataa

SEQ ID NO: 2465 - DNA, 16 bp, synthetic construct
  misc_feature 1..16: note = Synthetic construct
  source 1..16: mol_type = other DNA
acactgacatgatcca

SEQ ID NO: 2466 - DNA, 16 bp, synthetic construct
  misc_feature 1..16: note = Synthetic construct
  source 1..16: mol_type = other DNA
ataagagtctgatacg

SEQ ID NO: 2467 - DNA, 16 bp, synthetic construct
  misc_feature 1..16: note = Synthetic construct
  source 1..16: mol_type = other DNA
agcttgatccaaacac

SEQ ID NO: 2468 - DNA, 16 bp, synthetic construct
  misc_feature 1..16: note = Synthetic construct
  source 1..16: mol_type = other DNA
taagagatccgtaggc

SEQ ID NO: 2469 - DNA, 16 bp, synthetic construct
  misc_feature 1..16: note = Synthetic construct
  source 1..16: mol_type = other DNA
gatcgcgtccttgacc

SEQ ID NO: 2470 - DNA, 16 bp, synthetic construct
  misc_feature 1..16: note = Synthetic construct
  source 1..16: mol_type = other DNA
gtcatttcagtaagat

SEQ ID NO: 2471 - DNA, 16 bp, synthetic construct
  misc_feature 1..16: note = Synthetic construct
  source 1..16: mol_type = other DNA
gtaacgtagaaggaca

SEQ ID NO: 2472 - DNA, 16 bp, synthetic construct
  misc_feature 1..16: note = Synthetic construct
  source 1..16: mol_type = other DNA
atccgaagttaagatg

SEQ ID NO: 2473 - DNA, 16 bp, synthetic construct
  misc_feature 1..16: note = Synthetic construct
  source 1..16: mol_type = other DNA
attctacaggtagcca

SEQ ID NO: 2474 - DNA, 16 bp, synthetic construct
  misc_feature 1..16: note = Synthetic construct
  source 1..16: mol_type = other DNA
gaacggagtgactact

SEQ ID NO: 2475 - DNA, 16 bp, synthetic construct
  misc_feature 1..16: note = Synthetic construct
  source 1..16: mol_type = other DNA
tacttgtagtacgacg

SEQ ID NO: 2476 - DNA, 16 bp, synthetic construct
  misc_feature 1..16: note = Synthetic construct
  source 1..16: mol_type = other DNA
tctctaacagttaacc

SEQ ID NO: 2477 - DNA, 16 bp, synthetic construct
  misc_feature 1..16: note = Synthetic construct
  source 1..16: mol_type = other DNA
actgctccacagaggt

SEQ ID NO: 2478 - DNA, 16 bp, synthetic construct
  misc_feature 1..16: note = Synthetic construct
  source 1..16: mol_type = other DNA
aatccaggtccatgat

SEQ ID NO: 2479 - DNA, 16 bp, synthetic construct
  misc_feature 1..16: note = Synthetic construct
  source 1..16: mol_type = other DNA
gatcgataggcgacat

SEQ ID NO: 2480 - DNA, 16 bp, synthetic construct
  misc_feature 1..16: note = Synthetic construct
  source 1..16: mol_type = other DNA
tcggtaatcaacgaaa

SEQ ID NO: 2481 - DNA, 16 bp, synthetic construct
  misc_feature 1..16: note = Synthetic construct
  source 1..16: mol_type = other DNA
tggccagcaccgctag

SEQ ID NO: 2482 - DNA, 16 bp, synthetic construct
  misc_feature 1..16: note = Synthetic construct
  source 1..16: mol_type = other DNA
agcggtctcacctcgt

SEQ ID NO: 2483 - DNA, 16 bp, synthetic construct
  misc_feature 1..16: note = Synthetic construct
  source 1..16: mol_type = other DNA
cgtgtaatcgtgggaa

SEQ ID NO: 2484 - DNA, 16 bp, synthetic construct
  misc_feature 1..16: note = Synthetic construct
  source 1..16: mol_type = other DNA
tcattacgtaccgtta

SEQ ID NO: 2485 - DNA, 16 bp, synthetic construct
  misc_feature 1..16: note = Synthetic construct
  source 1..16: mol_type = other DNA
cctttctaggattcgg

SEQ ID NO: 2486 - DNA, 16 bp, synthetic construct
  misc_feature 1..16: note = Synthetic construct
  source 1..16: mol_type = other DNA
cacacaagtagattag

SEQ ID NO: 2487 - DNA, 16 bp, synthetic construct
  misc_feature 1..16: note = Synthetic construct
  source 1..16: mol_type = other DNA
atgcgattctgtccgt

SEQ ID NO: 2488 - DNA, 16 bp, synthetic construct
  misc_feature 1..16: note = Synthetic construct
  source 1..16: mol_type = other DNA
tcccgatagactagat

SEQ ID NO: 2489 - DNA, 16 bp, synthetic construct
  misc_feature 1..16: note = Synthetic construct
  source 1..16: mol_type = other DNA
gcgggtttcttctggc

SEQ ID NO: 2490 - DNA, 16 bp, synthetic construct
  misc_feature 1..16: note = Synthetic construct
  source 1..16: mol_type = other DNA
gcactcttcacttcat

SEQ ID NO: 2491 - DNA, 16 bp, synthetic construct
  misc_feature 1..16: note = Synthetic construct
  source 1..16: mol_type = other DNA
gtcgggtcaccacgtg

SEQ ID NO: 2492 - DNA, 16 bp, synthetic construct
  misc_feature 1..16: note = Synthetic construct
  source 1..16: mol_type = other DNA
attctaccacagaggt

SEQ ID NO: 2493 - DNA, 16 bp, synthetic construct
  misc_feature 1..16: note = Synthetic construct
  source 1..16: mol_type = other DNA
tgcccatcaatgttgc

SEQ ID NO: 2494 - DNA, 16 bp, synthetic construct
  misc_feature 1..16: note = Synthetic construct
  source 1..16: mol_type = other DNA
ttctcaacaggtttca

SEQ ID NO: 2495 - DNA, 16 bp, synthetic construct
  misc_feature 1..16: note = Synthetic construct
  source 1..16: mol_type = other DNA
gtcctcatcaacacca

SEQ ID NO: 2496 - DNA, 16 bp, synthetic construct
  misc_feature 1..16: note = Synthetic construct
  source 1..16: mol_type = other DNA
gggacctgtaagttcc

SEQ ID NO: 2497 - DNA, 16 bp, synthetic construct
  misc_feature 1..16: note = Synthetic construct
  source 1..16: mol_type = other DNA
catgcctgtttgtttc

SEQ ID NO: 2498 - DNA, 16 bp, synthetic construct
  misc_feature 1..16: note = Synthetic construct
  source 1..16: mol_type = other DNA
gggtctgagggctctc

SEQ ID NO: 2499 - DNA, 16 bp, synthetic construct
  misc_feature 1..16: note = Synthetic construct
  source 1..16: mol_type = other DNA
gttacagaggagtacc

SEQ ID NO: 2500 - DNA, 16 bp, synthetic construct
  misc_feature 1..16: note = Synthetic construct
  source 1..16: mol_type = other DNA
cagctggtccaatggt

SEQ ID NO: 2501 - DNA, 16 bp, synthetic construct
  misc_feature 1..16: note = Synthetic construct
  source 1..16: mol_type = other DNA
gtgtgcgaggcccgtt

SEQ ID NO: 2502 - DNA, 16 bp, synthetic construct
  misc_feature 1..16: note = Synthetic construct
  source 1..16: mol_type = other DNA
gaacctatcctcaacc

SEQ ID NO: 2503 - DNA, 16 bp, synthetic construct
  misc_feature 1..16: note = Synthetic construct
  source 1..16: mol_type = other DNA
ctcacaccagggcata

SEQ ID NO: 2504 - DNA, 16 bp, synthetic construct
  misc_feature 1..16: note = Synthetic construct
  source 1..16: mol_type = other DNA
gctgcttcaatgttgc

SEQ ID NO: 2505 - DNA, 16 bp, synthetic construct
  misc_feature 1..16: note = Synthetic construct
  source 1..16: mol_type = other DNA
tgctgctgtaaagtca

SEQ ID NO: 2506 - DNA, 16 bp, synthetic construct
  misc_feature 1..16: note = Synthetic construct
  source 1..16: mol_type = other DNA
cacacctagcaatctc

SEQ ID NO: 2507 - DNA, 16 bp, synthetic construct
  misc_feature 1..16: note = Synthetic construct
  source 1..16: mol_type = other DNA
tcgaggccagcttaac

SEQ ID NO: 2508 - DNA, 16 bp, synthetic construct
  misc_feature 1..16: note = Synthetic construct
  source 1..16: mol_type = other DNA
cagatcaagtagccga

SEQ ID NO: 2509 - DNA, 16 bp, synthetic construct
  misc_feature 1..16: note = Synthetic construct
  source 1..16: mol_type = other DNA
actttcaaggcattgg

SEQ ID NO: 2510 - DNA, 16 bp, synthetic construct
  misc_feature 1..16: note = Synthetic construct
  source 1..16: mol_type = other DNA
cacaggcagttaacga

SEQ ID NO: 2511 - DNA, 16 bp, synthetic construct
  misc_feature 1..16: note = Synthetic construct
  source 1..16: mol_type = other DNA
cctctgacagtcagag

SEQ ID NO: 2512 - DNA, 16 bp, synthetic construct
  misc_feature 1..16: note = Synthetic construct
  source 1..16: mol_type = other DNA
tcatttggttccatga

SEQ ID NO: 2513 - DNA, 16 bp, synthetic construct
  misc_feature 1..16: note = Synthetic construct
  source 1..16: mol_type = other DNA
ccaatcccacaccgac

SEQ ID NO: 2514 - DNA, 16 bp, synthetic construct
  misc_feature 1..16: note = Synthetic construct
  source 1..16: mol_type = other DNA
gttctcgcatagactc

SEQ ID NO: 2515 - DNA, 16 bp, synthetic construct
  misc_feature 1..16: note = Synthetic construct
  source 1..16: mol_type = other DNA
ctctacgtccctcttt

SEQ ID NO: 2516 - DNA, 16 bp, synthetic construct
  misc_feature 1..16: note = Synthetic construct
  source 1..16: mol_type = other DNA
ccgtactaggagttta

SEQ ID NO: 2517 - DNA, 16 bp, synthetic construct
  misc_feature 1..16: note = Synthetic construct
  source 1..16: mol_type = other DNA
catccacgtctcacct

SEQ ID NO: 2518 - DNA, 16 bp, synthetic construct
  misc_feature 1..16: note = Synthetic construct
  source 1..16: mol_type = other DNA
tcattacagtggagaa

SEQ ID NO: 2519 - DNA, 16 bp, synthetic construct
  misc_feature 1..16: note = Synthetic construct
  source 1..16: mol_type = other DNA
cgtcagggtcacccag

SEQ ID NO: 2520 - DNA, 16 bp, synthetic construct
  misc_feature 1..16: note = Synthetic construct
  source 1..16: mol_type = other DNA
acctttacagttcatg

SEQ ID NO: 2521 - DNA, 16 bp, synthetic construct
  misc_feature 1..16: note = Synthetic construct
  source 1..16: mol_type = other DNA
ggcgtgtcaatagagt

SEQ ID NO: 2522 - DNA, 16 bp, synthetic construct
  misc_feature 1..16: note = Synthetic construct
  source 1..16: mol_type = other DNA
tttactgtcagagacg

SEQ ID NO: 2523 - DNA, 16 bp, synthetic construct
  misc_feature 1..16: note = Synthetic construct
  source 1..16: mol_type = other DNA
tagccggtccacgttc

SEQ ID NO: 2524 - DNA, 16 bp, synthetic construct
  misc_feature 1..16: note = Synthetic construct
  source 1..16: mol_type = other DNA
tttactgtcctttaca

SEQ ID NO: 2525 - DNA, 16 bp, synthetic construct
  misc_feature 1..16: note = Synthetic construct
  source 1..16: mol_type = other DNA
gtcgggtcaggctcac

SEQ ID NO: 2526 - DNA, 16 bp, synthetic construct
  misc_feature 1..16: note = Synthetic construct
  source 1..16: mol_type = other DNA
actgaactctgtttgt

SEQ ID NO: 2527 - DNA, 16 bp, synthetic construct
  misc_feature 1..16: note = Synthetic construct
  source 1..16: mol_type = other DNA
ctgctgtagtcctcct

SEQ ID NO: 2528 - DNA, 16 bp, synthetic construct
  misc_feature 1..16: note = Synthetic construct
  source 1..16: mol_type = other DNA
catattcgtttgactg

SEQ ID NO: 2529 - DNA, 16 bp, synthetic construct
  misc_feature 1..16: note = Synthetic construct
  source 1..16: mol_type = other DNA
ccttcgatcacaggcc

SEQ ID NO: 2530 - DNA, 16 bp, synthetic construct
  misc_feature 1..16: note = Synthetic construct
  source 1..16: mol_type = other DNA
ctgaaacagatcccat

SEQ ID NO: 2531 - DNA, 16 bp, synthetic construct
  misc_feature 1..16: note = Synthetic construct
  source 1..16: mol_type = other DNA
tcaggattcataaagg

SEQ ID NO: 2532 - DNA, 16 bp, synthetic construct
  misc_feature 1..16: note = Synthetic construct
  source 1..16: mol_type = other DNA
ttgccgtgttcgaatc

SEQ ID NO: 2533 - DNA, 16 bp, synthetic construct
  misc_feature 1..16: note = Synthetic construct
  source 1..16: mol_type = other DNA
gatcgtagtcaagcga

SEQ ID NO: 2534 - DNA, 16 bp, synthetic construct
  misc_feature 1..16: note = Synthetic construct
  source 1..16: mol_type = other DNA
ttatgcttcatgtagc

SEQ ID NO: 2535 - DNA, 16 bp, synthetic construct
  misc_feature 1..16: note = Synthetic construct
  source 1..16: mol_type = other DNA
tgttccgtctccaacc

SEQ ID NO: 2536 - DNA, 16 bp, synthetic construct
  misc_feature 1..16: note = Synthetic construct
  source 1..16: mol_type = other DNA
tcgtacccacagacag

SEQ ID NO: 2537 - DNA, 16 bp, synthetic construct
  misc_feature 1..16: note = Synthetic construct
  source 1..16: mol_type = other DNA
cattcgcgtctcaaca

SEQ ID NO: 2538 - DNA, 16 bp, synthetic construct
  misc_feature 1..16: note = Synthetic construct
  source 1..16: mol_type = other DNA
attatcctcttgagac

SEQ ID NO: 2539 - DNA, 16 bp, synthetic construct
  misc_feature 1..16: note = Synthetic construct
  source 1..16: mol_type = other DNA
gtaggcccacggtaga

SEQ ID NO: 2540 - DNA, 16 bp, synthetic construct
  misc_feature 1..16: note = Synthetic construct
  source 1..16: mol_type = other DNA
cgttgggtcatctgcc

SEQ ID NO: 2541 - DNA, 16 bp, synthetic construct
  misc_feature 1..16: note = Synthetic construct
  source 1..16: mol_type = other DNA
cgcgttttctgtgcaa

SEQ ID NO: 2542 - DNA, 16 bp, synthetic construct
  misc_feature 1..16: note = Synthetic construct
  source 1..16: mol_type = other DNA
gaggtgacagtttacg

SEQ ID NO: 2543 - DNA, 16 bp, synthetic construct
  misc_feature 1..16: note = Synthetic construct
  source 1..16: mol_type = other DNA
ctgatcccatctccca

SEQ ID NO: 2544 - DNA, 16 bp, synthetic construct
  misc_feature 1..16: note = Synthetic construct
  source 1..16: mol_type = other DNA
tactcgcgtcttgtcc

SEQ ID NO: 2545 - DNA, 16 bp, synthetic construct
  misc_feature 1..16: note = Synthetic construct
  source 1..16: mol_type = other DNA
ctgcggagtgtgcctg

SEQ ID NO: 2546 - DNA, 16 bp, synthetic construct
  misc_feature 1..16: note = Synthetic construct
  source 1..16: mol_type = other DNA
tagtggtgtattagcc

SEQ ID NO: 2547 - DNA, 16 bp, synthetic construct
  misc_feature 1..16: note = Synthetic construct
  source 1..16: mol_type = other DNA
tcagatgaggagtaga

SEQ ID NO: 2548 - DNA, 16 bp, synthetic construct
  misc_feature 1..16: note = Synthetic construct
  source 1..16: mol_type = other DNA
tttcctcgtgtttggt

SEQ ID NO: 2549 - DNA, 16 bp, synthetic construct
  misc_feature 1..16: note = Synthetic construct
  source 1..16: mol_type = other DNA
cacactcgtaagtagt

SEQ ID NO: 2550 - DNA, 16 bp, synthetic construct
  misc_feature 1..16: note = Synthetic construct
  source 1..16: mol_type = other DNA
ccaatccagttagcgg

SEQ ID NO: 2551 - DNA, 16 bp, synthetic construct
  misc_feature 1..16: note = Synthetic construct
  source 1..16: mol_type = other DNA
atcacgacaagccgtc

SEQ ID NO: 2552 - DNA, 16 bp, synthetic construct
  misc_feature 1..16: note = Synthetic construct
  source 1..16: mol_type = other DNA
agaatagtcttgacga

SEQ ID NO: 2553 - DNA, 16 bp, synthetic construct
  misc_feature 1..16: note = Synthetic construct
  source 1..16: mol_type = other DNA
ggaacttagttgagta

SEQ ID NO: 2554 - DNA, 16 bp, synthetic construct
  misc_feature 1..16: note = Synthetic construct
  source 1..16: mol_type = other DNA
atcgagtagtttgcgt

SEQ ID NO: 2555 - DNA, 16 bp, synthetic construct
  misc_feature 1..16: note = Synthetic construct
  source 1..16: mol_type = other DNA
aaggcagcaaggtgtg

SEQ ID NO: 2556 - DNA, 16 bp, synthetic construct
  misc_feature 1..16: note = Synthetic construct
  source 1..16: mol_type = other DNA
ccctccttcatcgatg

SEQ ID NO: 2557 - DNA, 16 bp, synthetic construct
  misc_feature 1..16: note = Synthetic construct
  source 1..16: mol_type = other DNA
atccacctcaaacaag

SEQ ID NO: 2558 - DNA, 16 bp, synthetic construct
  misc_feature 1..16: note = Synthetic construct
  source 1..16: mol_type = other DNA
ctgcggacatatgctg

SEQ ID NO: 2559 - DNA, 16 bp, synthetic construct
  misc_feature 1..16: note = Synthetic construct
  source 1..16: mol_type = other DNA
gcgggttcatgcaatc

SEQ ID NO: 2560 - DNA, 16 bp, synthetic construct
  misc_feature 1..16: note = Synthetic construct
  source 1..16: mol_type = other DNA
tctgagatcaggtaaa

SEQ ID NO: 2561 - DNA, 16 bp, synthetic construct
  misc_feature 1..16: note = Synthetic construct
  source 1..16: mol_type = other DNA
agtgagggtcgtggct

SEQ ID NO: 2562 - DNA, 16 bp, synthetic construct
  misc_feature 1..16: note = Synthetic construct
  source 1..16: mol_type = other DNA
atgagggcactacagt

SEQ ID NO: 2563 - DNA, 16 bp, synthetic construct
  misc_feature 1..16: note = Synthetic construct
  source 1..16: mol_type = other DNA
gaacctagtcaaagat

SEQ ID NO: 2564 - DNA, 16 bp, synthetic construct
  misc_feature 1..16: note = Synthetic construct
  source 1..16: mol_type = other DNA
tctgagacaatggacg

SEQ ID NO: 2565 - DNA, 16 bp, synthetic construct
  misc_feature 1..16: note = Synthetic construct
  source 1..16: mol_type = other DNA
cgttctgaggacagct

SEQ ID NO: 2566 - DNA, 16 bp, synthetic construct
  misc_feature 1..16: note = Synthetic construct
  source 1..16: mol_type = other DNA
catgacatcatttggg

SEQ ID NO: 2567 - DNA, 16 bp, synthetic construct
  misc_feature 1..16: note = Synthetic construct
  source 1..16: mol_type = other DNA
cgccaagagctttggt

SEQ ID NO: 2568 - DNA, 16 bp, synthetic construct
  misc_feature 1..16: note = Synthetic construct
  source 1..16: mol_type = other DNA
gattcagagaggttgc

SEQ ID NO: 2569 - DNA, 16 bp, synthetic construct
  misc_feature 1..16: note = Synthetic construct
  source 1..16: mol_type = other DNA
ttaactcagtaatccc

SEQ ID NO: 2570 - DNA, 16 bp, synthetic construct
  misc_feature 1..16: note = Synthetic construct
  source 1..16: mol_type = other DNA
cagctaatcgctagcg

SEQ ID NO: 2571 - DNA, 16 bp, synthetic construct
  misc_feature 1..16: note = Synthetic construct
  source 1..16: mol_type = other DNA
cgcttcatcatctgcc

SEQ ID NO: 2572 - DNA, 16 bp, synthetic construct
  misc_feature 1..16: note = Synthetic construct
  source 1..16: mol_type = other DNA
tattaccgtcgcgtgt

SEQ ID NO: 2573 - DNA, 16 bp, synthetic construct
  misc_feature 1..16: note = Synthetic construct
  source 1..16: mol_type = other DNA
catcgaagtccgacgt

SEQ ID NO: 2574 - DNA, 16 bp, synthetic construct
  misc_feature 1..16: note = Synthetic construct
  source 1..16: mol_type = other DNA
tttgtcagtcagaagc

SEQ ID NO: 2575 - DNA, 16 bp, synthetic construct
  misc_feature 1..16: note = Synthetic construct
  source 1..16: mol_type = other DNA
cccatactcagcctaa

SEQ ID NO: 2576 - DNA, 16 bp, synthetic construct
  misc_feature 1..16: note = Synthetic construct
  source 1..16: mol_type = other DNA
cgtccattcgaactgt

SEQ ID NO: 2577 - DNA, 16 bp, synthetic construct
  misc_feature 1..16: note = Synthetic construct
  source 1..16: mol_type = other DNA
ctcattatcgtaggag

SEQ ID NO: 2578 - DNA, 16 bp, synthetic construct
  misc_feature 1..16: note = Synthetic construct
  source 1..16: mol_type = other DNA
taagcgtgtcggcact

SEQ ID NO: 2579 - DNA, 16 bp, synthetic construct
  misc_feature 1..16: note = Synthetic construct
  source 1..16: mol_type = other DNA
catcgggtcaaccatg

SEQ ID NO: 2580 - DNA, 16 bp, synthetic construct
  misc_feature 1..16: note = Synthetic construct
  source 1..16: mol_type = other DNA
acagccgtcttgggta

SEQ ID NO: 2581 - DNA, 16 bp, synthetic construct
  misc_feature 1..16: note = Synthetic construct
  source 1..16: mol_type = other DNA
tggctgggttactgac

SEQ ID NO: 2582 - DNA, 16 bp, synthetic construct
  misc_feature 1..16: note = Synthetic construct
  source 1..16: mol_type = other DNA
gcgaccatcagcaact

SEQ ID NO: 2583 - DNA, 16 bp, synthetic construct
  misc_feature 1..16: note = Synthetic construct
  source 1..16: mol_type = other DNA
cgagcacagtgtttgc

SEQ ID NO: 2584 - DNA, 16 bp, synthetic construct
  misc_feature 1..16: note = Synthetic construct
  source 1..16: mol_type = other DNA
atctactgtaacgacg

SEQ ID NO: 2585 - DNA, 16 bp, synthetic construct
  misc_feature 1..16: note = Synthetic construct
  source 1..16: mol_type = other DNA
agcttgacatcacgat

SEQ ID NO: 2586 - DNA, 16 bp, synthetic construct
  misc_feature 1..16: note = Synthetic construct
  source 1..16: mol_type = other DNA
acgtcaagtgactcat

SEQ ID NO: 2587 - DNA, 16 bp, synthetic construct
  misc_feature 1..16: note = Synthetic construct
  source 1..16: mol_type = other DNA
catggcgcatcggtta

SEQ ID NO: 2588 - DNA, 16 bp, synthetic construct
  misc_feature 1..16: note = Synthetic construct
  source 1..16: mol_type = other DNA
accgtaagtagcaaat

SEQ ID NO: 2589 - DNA, 16 bp, synthetic construct
  misc_feature 1..16: note = Synthetic construct
  source 1..16: mol_type = other DNA
ctagagtcatgcaatc

SEQ ID NO: 2590 - DNA, 16 bp, synthetic construct
  misc_feature 1..16: note = Synthetic construct
  source 1..16: mol_type = other DNA
caggtgccaatcacac

SEQ ID NO: 2591 - DNA, 16 bp, synthetic construct
  misc_feature 1..16: note = Synthetic construct
  source 1..16: mol_type = other DNA
ctgtttacaagtctgt

SEQ ID NO: 2592 - DNA, 16 bp, synthetic construct
  misc_feature 1..16: note = Synthetic construct
  source 1..16: mol_type = other DNA
gaacctatcatggtca

SEQ ID NO: 2593 - DNA, 16 bp, synthetic construct
  misc_feature 1..16: note = Synthetic construct
  source 1..16: mol_type = other DNA
gttcgggtccctaatt

SEQ ID NO: 2594 - DNA, 16 bp, synthetic construct
  misc_feature 1..16: note = Synthetic construct
  source 1..16: mol_type = other DNA
gtagtcatcaaagaca

SEQ ID NO: 2595 - DNA, 16 bp, synthetic construct
  misc_feature 1..16: note = Synthetic construct
  source 1..16: mol_type = other DNA
ttaggcacagtaagat

SEQ ID NO: 2596 - DNA, 16 bp, synthetic construct
  misc_feature 1..16: note = Synthetic construct
  source 1..16: mol_type = other DNA
gcaatcagtgacaaat

SEQ ID NO: 2597 - DNA, 16 bp, synthetic construct
  misc_feature 1..16: note = Synthetic construct
  source 1..16: mol_type = other DNA
acagctatcccaagat

SEQ ID NO: 2598 - DNA, 16 bp, synthetic construct
  misc_feature 1..16: note = Synthetic construct
  source 1..16: mol_type = other DNA
gcgggttcattaaccg

SEQ ID NO: 2599 - DNA, 16 bp, synthetic construct
  misc_feature 1..16: note = Synthetic construct
  source 1..16: mol_type = other DNA
cagagagagagtaatc

SEQ ID NO: 2600 - DNA, 16 bp, synthetic construct
  misc_feature 1..16: note = Synthetic construct
  source 1..16: mol_type = other DNA
ctcgggacatagactc

SEQ ID NO: 2601 - DNA, 16 bp, synthetic construct
  misc_feature 1..16: note = Synthetic construct
  source 1..16: mol_type = other DNA
cccagttgtggcccta

SEQ ID NO: 2602 - DNA, 16 bp, synthetic construct
  misc_feature 1..16: note = Synthetic construct
  source 1..16: mol_type = other DNA
actgatgaggaatgga

SEQ ID NO: 2603 - DNA, 16 bp, synthetic construct
  misc_feature 1..16: note = Synthetic construct
  source 1..16: mol_type = other DNA
actgagtagcacacag

SEQ ID NO: 2604 - DNA, 16 bp, synthetic construct
  misc_feature 1..16: note = Synthetic construct
  source 1..16: mol_type = other DNA
aactcttagttgagta

SEQ ID NO: 2605 - DNA, 16 bp, synthetic construct
  misc_feature 1..16: note = Synthetic construct
  source 1..16: mol_type = other DNA
cgctggaagaattgtg

SEQ ID NO: 2606 - DNA, 16 bp, synthetic construct
  misc_feature 1..16: note = Synthetic construct
  source 1..16: mol_type = other DNA
tacttaccacgaagca

SEQ ID NO: 2607 - DNA, 16 bp, synthetic construct
  misc_feature 1..16: note = Synthetic construct
  source 1..16: mol_type = other DNA
agaatagtcttgccgt

SEQ ID NO: 2608 - DNA, 16 bp, synthetic construct
  misc_feature 1..16: note = Synthetic construct
  source 1..16: mol_type = other DNA
gaaatgatcattgccc

SEQ ID NO: 2609 - DNA, 16 bp, synthetic construct
  misc_feature 1..16: note = Synthetic construct
  source 1..16: mol_type = other DNA
aaacctgtcctgtacc

SEQ ID NO: 2610 - DNA, 16 bp, synthetic construct
  misc_feature 1..16: note = Synthetic construct
  source 1..16: mol_type = other DNA
catattcgtcaaagcg

SEQ ID NO: 2611 - DNA, 16 bp, synthetic construct
  misc_feature 1..16: note = Synthetic construct
  source 1..16: mol_type = other DNA
ctaatggcatatggtc

SEQ ID NO: 2612 - DNA, 16 bp, synthetic construct
  misc_feature 1..16: note = Synthetic construct
  source 1..16: mol_type = other DNA
aactcagcagcatact

SEQ ID NO: 2613 - DNA, 16 bp, synthetic construct
  misc_feature 1..16: note = Synthetic construct
  source 1..16: mol_type = other DNA
tagttgggtcgcatat

SEQ ID NO: 2614 - DNA, 16 bp, synthetic construct
  misc_feature 1..16: note = Synthetic construct
  source 1..16: mol_type = other DNA
cttaccgtcgatccct

SEQ ID NO: 2615 - DNA, 16 bp, synthetic construct
  misc_feature 1..16: note = Synthetic construct
  source 1..16: mol_type = other DNA
gagcagagtgcactta

SEQ ID NO: 2616 - DNA, 16 bp, synthetic construct
  misc_feature 1..16: note = Synthetic construct
  source 1..16: mol_type = other DNA
cgtaggccagacgcaa

SEQ ID NO: 2617 - DNA, 16 bp, synthetic construct
  misc_feature 1..16: note = Synthetic construct
  source 1..16: mol_type = other DNA
acaccctaggcgtaca

SEQ ID NO: 2618 - DNA, 16 bp, synthetic construct
  misc_feature 1..16: note = Synthetic construct
  source 1..16: mol_type = other DNA
acatcagtcggcgcta

SEQ ID NO: 2619 - DNA, 16 bp, synthetic construct
  misc_feature 1..16: note = Synthetic construct
  source 1..16: mol_type = other DNA
gcttgaaagacataac

SEQ ID NO: 2620 - DNA, 16 bp, synthetic construct
  misc_feature 1..16: note = Synthetic construct
  source 1..16: mol_type = other DNA
cagctaatcgacggaa

SEQ ID NO: 2621 - DNA, 16 bp, synthetic construct
  misc_feature 1..16: note = Synthetic construct
  source 1..16: mol_type = other DNA
tttgcgcagcacacag

SEQ ID NO: 2622 - DNA, 16 bp, synthetic construct
  misc_feature 1..16: note = Synthetic construct
  source 1..16: mol_type = other DNA
tctgagacatggtcat

SEQ ID NO: 2623 - DNA, 16 bp, synthetic construct
  misc_feature 1..16: note = Synthetic construct
  source 1..16: mol_type = other DNA
aactttctccgtcaaa

SEQ ID NO: 2624 - DNA, 16 bp, synthetic construct
  misc_feature 1..16: note = Synthetic construct
  source 1..16: mol_type = other DNA
tctctaaagcgccttg

SEQ ID NO: 2625 - DNA, 16 bp, synthetic construct
  misc_feature 1..16: note = Synthetic construct
  source 1..16: mol_type = other DNA
taagtgctcagtgcat

SEQ ID NO: 2626 - DNA, 16 bp, synthetic construct
  misc_feature 1..16: note = Synthetic construct
  source 1..16: mol_type = other DNA
cctagctgttcaggcc

SEQ ID NO: 2627 - DNA, 16 bp, synthetic construct
  misc_feature 1..16: note = Synthetic construct
  source 1..16: mol_type = other DNA
accagtagtgtcaatc

SEQ ID NO: 2628 - DNA, 199 bp, synthetic construct
  misc_feature 1..199: note = Synthetic construct
  source 1..199: mol_type = other DNA
ggggccctcaagagtcgaatcatcatctccctagacacgtccaagaatcagttctccctgaaactgagctctgtgaccgccgcagacacggctgtgtattactgtgcgagacatcgggattacgacattttgactggttattatatgggggactactttgactactggggccagggaaccctggtcaccgtctcctcag

SEQ ID NO: 2629 - DNA, 147 bp, synthetic construct
  misc_feature 1..147: note = Synthetic construct
  source 1..147: mol_type = other DNA
gggggaaccagttctccctgacgctgagctctgtgaccgccgcagacacggctatatattactgtgcgagacttaacttggggttcctacagattgggggttcccttgatatctggggccaagggacactggtcaccgtctcttcag

SEQ ID NO: 2630 - DNA, 170 bp, synthetic construct
  misc_feature 1..170: note = Synthetic construct
  source 1..170: mol_type = other DNA
atttggggcagtggacacgtccaagaaccagttctccctgaggctggactctgtgaccgctgcagacacggccgtgtattactgtgcgagagctcggggttattattatgatagtagtggttatcaaattgactactggggccagggaaccctggtcaccgtctcctcag

SEQ ID NO: 2631 - DNA, 231 bp, synthetic construct
  misc_feature 1..231: note = Synthetic construct
  source 1..231: mol_type = other DNA
ggggaaatcaatcatagtggaagcaccaactacaacccgtccctcaagagtcgagtcaccatatcaatagacacgtccaagaagcaggtctccctgaagttgagctctgtgaacgccgcggacacggctgtgtattactgtgcgagagttattactagggcgagtcctggcacagacgggaggtacggtatggacgtctggggccaagggaccacggtcaccgtctcctca

SEQ ID NO: 2632 - DNA, 279 bp, synthetic construct
  misc_feature 1..279: note = Synthetic construct
  source 1..279: mol_type = other DNA
ggacaagggcttgaatggattggaggcagcatccctatgtatgaaacaacaaattacgcacagaagttccagggcagggtcaacatcgtcgcggacgtatacacgagcacagcctacatggaggtgaacagcctgacgcctgaggacacggctgtatatttctgcgcgcggggccacagtagctcgtctcaacggtctagcttcgacggtaactttttatactactactatcaccaaatggacgtctggggcacagggaccacggtcaccgtctccaca

SEQ ID NO: 2633 - DNA, 277 bp, synthetic construct
  misc_feature 1..277: note = Synthetic construct
  source 1..277: mol_type = other DNA
gggatccggcagcccgccgggaagggactggagtggattgggcgaattcaaagcggtgggaccacccattacaacccctccctcaggagtcgtgtcagcatctcactagactcgtcacagaaccaattttctctgcaattgagatctgtgacccccgcagacacggccgtgtatttctgtgtgacttctttaattcggccatattgtagtggcggtgtctgctattcgaactggttcgacccctggggcccgggaacccaggtcaccgtctcctcag

SEQ ID NO: 2634 - DNA, 370 bp, synthetic construct
  misc_feature 1..370: note = Synthetic construct
  source 1..370: mol_type = other DNA
caggtgcagctggtacagtctggagctgaggtgaagaagcctggggcctcagtgaaggtctcttgtaaggcttccgattacagttttaccacctatggaaccatctgggtgcgacaggcccctggacaagggcttgagtggatgggatggatcagcggtcataatggtaacacaaattatgcacagaagttccagggcagagtctccatgaccacagacacatccacgaccacagcctacatggagctgaggagtctgagatctgacgactcggccgtgtactactgtgcgagaggtcggggattgcagcaccagctgacagactggttcgacccctggggccagggaaccctggtcaccgtctcctcag

SEQ ID NO: 2635 - DNA, 317 bp, synthetic construct
  misc_feature 1..317: note = Synthetic construct
  source 1..317: mol_type = other DNA
tgtatgggcatgcaaggcctctggatacaccttcaccggtttctacataaactgggtgcgacaggcccctggacaagggcttgagtggatggccataatcaaccctactggtgctaccacaggtatcgcacagaagttccagggcagagtcaccatgaccagggacaggtccacgagcacagttttcctggagttgcgcagtctgagatctgacgacacggccgtctattattgtgcgagagtcccccccccgggagtggctaataataagtggttcgacctctggggccagggaacccgggtcaccgtctcctcag

SEQ ID NO: 2636 - DNA, 382 bp, synthetic construct
  misc_feature 1..382: note = Synthetic construct
  source 1..382: mol_type = other DNA
caggtccagctggtgcagtctggggctgaggtgaagaagcctgggtcctcggtgaaggtctcctgcgagacctctggaggcaccttcggcagctctgctataagctggctgcgacaggcccctggacaaggactcgaatggatgggaggaatcatccctctgtttgattcaccaatgtacgcagagaaatttcagggcagagtcgcgattaccacggacgaatccacgaacacagcctacctggagctgggcggcctgaaatcagaggacacggccgtgtatttttgtgcgagaggggaaggtccggggacttatatagtctcggggcgatggggctactttgagttctggggccagggaaccctggtcaccgtctcctcag

SEQ ID NO: 2637 - DNA, 361 bp, synthetic construct
  misc_feature 1..361: note = Synthetic construct
  source 1..361: mol_type = other DNA
gaggtgcagctggtggagtctgggggaggcttggtccagcctggggggtccctgaaactctcctgtgcagcctctgggttcatgttcagtggttctactatacactgggtccgccaggcccccgggaaagggctggagtgggttggccgtattcgaaccaagactttcaattacgcgacagcatatggtacgtcgatgaagggcaggttcaccttctccagagatgattcaaggagcacggcatatcttcaaataaacagcctgaaacccgaggacacggccgtgtattattgtggtagaccaggaatggcagaagttggtacttattggggccagggaaccctggtcaccgtctcctcag

SEQ ID NO: 2638 - DNA, 373 bp, synthetic construct
  misc_feature 1..373: note = Synthetic construct
  source 1..373: mol_type = other DNA
caggtgcacctggtggagtctgggggaggcgtggtccagcctgggaggtccctgagactctcctgtgcggcctctggattcaccttcagtagctatggcatacactgggtccgccaggctccaggcaaggggccggagtgggtggcagttatatcatatgatggaaatgataaatattatgcagactccgtgaagggccgattcaccatctccagggacaactccaagaacacggtgtatctgcaaatgaacagcctgagagctgaggacacggctatgtattactgtgcgaaagatcgcagtagtggctggtaccggggttttggggggattgactactggggccagggaaccctggtcaccgtctcctcag

SEQ ID NO: 2639 - DNA, 355 bp, synthetic construct
  misc_feature 1..355: note = Synthetic construct
  source 1..355: mol_type = other DNA
caggtgcacctggtggagtccgggggaggcgtggtccagcctgggaggtccctgagactctcgtgtgtaggctctggattcaccttcgatagttatggcatacactgggtccgccaggctccaggcaaggggctggagtgggtgtcacttatatcgtatgatggaagcaatatatactatgcagactccgtgaagggccgtttcaccatctccagagacaattccaagaacacggtgtatttacaaatgaacagcctgcgacctgaggacacggctgtttactactgttcgagaaggagggctgggcccgattttgattactggggccggggaaccctggtcaccgtctcctcag

SEQ ID NO: 2640 - DNA, 367 bp, synthetic construct
  misc_feature 1..367: note = Synthetic construct
  source 1..367: mol_type = other DNA
gaggtgcagttggtggagtctgggggaggcttggtccagccgggggggtccctaagactctcctgtgcagcctcaggcttcaccttcagtggctctgctatacactgggtccgccaggcttccgggaaagggctggagtggcttgcccgtattagaagcagttctaacaaatatgcgacatcttatgctgcgtcggtgacaggcaggttcatcatctccagagatgatcccaagaacacggcgtttctgcagatggacagtctgaaaaccgaggacacggccatatattattgtactacccgacatcaatattgtactactaccaggtgcccctggggccagggaaccctggtcaccgtctcctcag

SEQ ID NO: 2641 - DNA, 358 bp, synthetic construct
  misc_feature 1..358: note = Synthetic construct
  source 1..358: mol_type = other DNA
gagatgcagctggtggagtccgggggaggcttggtccagccgggggggtccctgagactctcctgtgcagcctctgggttctccttcagtggctcggctatacactgggtccgccaggcttccgggaaagggctggagtgggtcggccgcaccagaagtaaggcaaacaatttcgcgacagactatgcctcgtcggtgagaggcaggttcaccatctccagagatgattcaaagaacacggcgtacttgcaaatgaacagcctgaagaccgaggacacggccgtctattattgtacggccgcgcgagttgcctggttcgacccctggggccagggaaccaaggtcaccgtctcctcag

SEQ ID NO: 2642 - DNA, 367 bp, synthetic construct
  misc_feature 1..367: note = Synthetic construct
  source 1..367: mol_type = other DNA
gaggtgcggctggtggagtctggggggggcttggtccagcctggggggtccctgaaactctcctgtgaagcgtctgggttcaccttcagtgagtctgcaatacactgggtccgccaggcttccgggaaggggctgcagtgggttggccatattaaaagcaaaagtaacaactatgcgacagtatacggtgcgtcggtgaaaggcaggttcaccatctccagagatgattcgaacaacacggcgtttctgcaaatgagcagcctgaaacccgaggacacggccctgtattattgcacgacaatattcggagaagtgttatatccttttgactcctggggccagggaaccctggtcaccgtctcctcag

SEQ ID NO: 2643 - DNA, 370 bp, synthetic construct
  misc_feature 1..370: note = Synthetic construct
  source 1..370: mol_type = other DNA
gaggtccagttggtacagtccggggctgaggtgaagaagcctggggccaccgtgaaaatctcctgcaaggcttctggatacaccttcaccgactactacatacactgggtgaagcaggcccctggaaaagggcttgagtggatgggacgtgttggtcctaaacctggtgaaacagtatatacagagaagttccagggcagagtcaccatgaccgcgaacacgtcttcagacacagccttcatggagctgagcagcctaagatctgacgacacggccttttattactgtgcaacagtgtataccaatgcctggtacggaggcgcgggttttgactactggggccagggaagcctggtcaccgtctcctcag

SEQ ID NO: 2644 - DNA, 385 bp, synthetic construct
  misc_feature 1..385: note = Synthetic construct
  source 1..385: mol_type = other DNA
caggtgcagttggtgcagtctggggctgaggtgaagaagcctggggcctcagtgaagatttcctgcaagtcatctggatacaccttcaccagttactatatacactgggtgcgacaggcccctggacaagggcttgactggatgggaattttcaaccctagtgccgataccaaaacctacgcacacaagttccagggcagagtcaccatgaccagggacacgtccacgagcacagtctacatggaactgagcagattgagatctgaggacacggccgtgtattactgtgcgagagcggcaattaaacgggatgggtatggttcggggagttatccagatgctttagacatctggggccaagggacagtggtcaccgtctcttcag

SEQ ID NO: 2645 - DNA, 370 bp, synthetic construct
  misc_feature 1..370: note = Synthetic construct
  source 1..370: mol_type = other DNA
caggtgcagctggtgcagtctggggctgaggtgaagaagcctggggcctcagtgaaggtctcctgtaaggcttctggatacaccttcaccgcctactacatacactgggtgcgacaggcccctggacaagggcttgagtggatgggatggatcaaccctgacagtggtgacacatactttgcacagaagtttcaaggcagggtcaccatgaccagggacacgtccatcagcacagtctacatggggctgagcagcctgagatctgacgacacggccgtctattactgtgcgaaacctccgggtaagggagcagtggctggcacctactttgactactggggccagggaaccctggtcaccgtctcctcag

SEQ ID NO: 2646 - DNA, 361 bp, synthetic construct
  misc_feature 1..361: note = Synthetic construct
  source 1..361: mol_type = other DNA
caagtgcaactggtgcagtctggggctgaggtgaagaagcctggggcctcagtgaaggtctcctgcaaggcttctggatacacctacagcggctactatatacactgggtgcgacaggcccctggacaggggcttgagtggatgggatggatcaaccctaacagtggtgtcacaaactatgcacagaagtttcagggcagggtcaccatgaccacagacacgtccatcagtacaacctacttggggctgaggacactgagatctgacgacacggccatattttattgtgcgagagatagttgtagtggtggaagttgctatgactactggggccagggaaccctggtcaccgtctcctcag

SEQ ID NO: 2647 - DNA, 361 bp, synthetic construct
  misc_feature 1..361: note = Synthetic construct
  source 1..361: mol_type = other DNA
caggtacagctggtgcagtctgggtctgagttgaagaagcctggggcctcagtgacggtttcctgcaaggcttctggatacaccttcacaaactatgctatacagtgggtgcgacaggcccccggacaggggcttgagtggatgggatggatcaacaccgaccttgggaccccaacgtatgcccagggcttcacaggacgatttgtcttctccttggacacctccgccactacggcatatctgcagatcaccagcctcaagcctgaggacaccgccgtatattactgcgcgagacagggtctcggtggtcgggcctcgggagactcctggggccagggaaccttggtcaccgtctcctcag

SEQ ID NO: 2648 - DNA, 373 bp, synthetic construct
  misc_feature 1..373: note = Synthetic construct
  source 1..373: mol_type = other DNA
caggtgcagctggtgcagtctggggctgaggtgaaggagcctggggcctcagtgaaggtctcctgcaaggcttctggatacaccttcatcggctattatatacattggatacgacaggcccctggacaaggccttgagtggatgggttggatcaaccctagcactggtggctcaaagtatgcacagaaatttcagggccgtgtcaccatgaccagggacacgtccatcagcactgcctacatggatataagcagactgacatctgacgacacggccatatattactgtgcgagatctccacctgcttatgccaactcaataaacaactggttcgacccctggggccagggaaccctggtcaccgtctcctcag

SEQ ID NO: 2649 - DNA, 361 bp, synthetic construct
  misc_feature 1..361: note = Synthetic construct
  source 1..361: mol_type = other DNA
caggtgcaactggtgcagtctggggctgaggtgaaggagcctggggcctcagtgaaaatttcctgcaaggcatctggctacactttcatcgataaccctatacattggattcgacaggcccctggacaaggactggagtggatggggatatacactcccaacggtggcagtacatactacgcacagaggttcgaggacagagtcaccatgaccgcagacgcgtccactaatacacttttcatggaattgagcagcctgagatctgacgacacggccatatatttctgtgcgagagataatagtactgggtggtattggtttgatccctgggggcagggaaccctggtcaccgtctcctcag

SEQ ID NO: 2650 - DNA, 364 bp, synthetic construct
  misc_feature 1..364: note = Synthetic construct
  source 1..364: mol_type = other DNA
caggtccaccttctgcagtctggggctgaggtgaagaagcctggggcctcagtgaaggtttcctgcgaggcttctggattcaccctcagtgactctgttatacattggctgcgccaggcccccggacaaagccctgaatggatgggatggatcaacaagtataatggtgacaagaaaatttcacagagcttgcagggcagagtcaccttgacagcggacacatccgcgaccacatcttacatggagctgagcagcctgacacttgaagacacggctttgtactactgtgcgaggggggaccggagcgtttaccccaactggttcgacctctggggccagggaacccaggtcaccgtctcctcag

SEQ ID NO: 2651 - DNA, 364 bp, synthetic construct
  misc_feature 1..364: note = Synthetic construct
  source 1..364: mol_type = other DNA
caggaacttttgatacagtctggggctgaggtgaagaagcctggggcctcagtgagggtctcctgcgcggcttctggatacaccttcaccggctactacatacattgggtgcgactggcccctggacagagacttgagtggctggggtggatcgaccctcacagtggtgccacagactttgcacagaagtttcgggacagggtcaccatgaccacggacacgtccatcaccacagcctacctggacgtgaccagactgacatctgacgacacggccatttatttctgtgcgagagccctctacggtggtcggggacactggttcgacccctggggccagggatccctggtcaccgtctcctcag

SEQ ID NO: 2652 - DNA, 349 bp, synthetic construct
  misc_feature 1..349: note = Synthetic construct
  source 1..349: mol_type = other DNA
caggtccagcttgtgcagtctggggctgaggtgaagaagcctggggcctcagtgaaggtttcctgcaaggcttctggagacgccttcagttatggtatacattgggtgcgccaggcccccggacaaaggcttgagtgcatgggatggatcaacgctggcaatggttacacaaaatattcacagaacttccaggacagagtcgcctttaccagggacacatccgcgagcactgcctacatggaactgagcagcctgaggtctgaagacacgggtatctattactgtgcgagactggactttcggggagtcctccgctggggccagggaactctggtcaccgtctcctcag

SEQ ID NO: 2653 - DNA, 376 bp, synthetic construct
  misc_feature 1..376: note = Synthetic construct
  source 1..376: mol_type = other DNA
caggtccaacttgtgcagtctggggctgaggtggagaagcctggggcctcggtgaaggtttcctgcaaggcttctgcatacaccttcagtaactatgctatacattgggtgcgccaggcccccggacaaaggcttgagtggatgggatggatcaaccctggcaacggtaacacaagatattcacagaatttccagggcagactcaccatgaccagggacacatccgcgaggacagcctacatggagctgagcagcctgacaattgaagacacggctgtgtattattgtgcgagagacttaacggaagtggtgggagcttctgtttccgatgcttttgatatctggggccaagggacaatggtcaccgtctcttcag

SEQ ID NO: 2654 - DNA, 382 bp, synthetic construct
  misc_feature 1..382: note = Synthetic construct
  source 1..382: mol_type = other DNA
caggtccagcttgtgcagtctggggctgaggtgaagaagcctggggcctcagtgaaggtttcctgcaaggcctctggatacaccttcattagctatgctatacattgggtgcgccaggcccccggacaaaggcttgagtggatgggttggatcaacgctggcaatggtaacacaaaatattcacagaccttccaggacagagtctccatcaccacggacacatccgcgaggacagcctacatggagctgagcagcctgagatccgaagacacggctgtgtattactgtgcgagaggatccttggcttatgatactagtggttattactaccgcaacttcttcgacccctggggccagggaaccctggtcaccgtctcctcag

SEQ ID NO: 2655 - DNA, 390 bp, synthetic construct
  misc_feature 1..390: note = Synthetic construct
  source 1..390: mol_type = other DNA
caggtgcagctggtgcagtctgtggctgaggtgaagaagcctggggcctcagtgaaggtctcctgcaaggcttctggatacaccttcaccggctactttatacattgggtgcggcaggcccctggacaggggcttgagtggatgggatatatcaaccctaacagtggtagcacaaactatgcacagaagtttcagggcagggtcaccgtgaccagggacacgtccatcagcacagcctacatggagctgagcagtctgcgatttgacgacacggccgtatattactgtgcgagagttcgctacgatttttggagtggttatgagggccggggggaggaccactatcacatggacgtctggggcaaagggaccacggtcactgtctcctca

SEQ ID NO: 2656 - DNA, 361 bp, synthetic construct
  misc_feature 1..361: note = Synthetic construct
  source 1..361: mol_type = other DNA
gaggtccagctgatacaatccggggctgaggtgaagaagcctgggacgaccgtgaaagtctcctgcaagacgtctggatactccttcaccgactaccccatagactggatacaacaggcccctggaaaagggcttgagtggatgggacgtgtggatcctcaagatggtgaaagatcatatgcagagagattccagggaagagtcacctttgccgtcgacacgtcaacagacacagtctacatggatttgaagggcctgagatccgaggacacggccgtttattattgtgtgacagatagcgcagggagcccctatgcctttgatatttggggccaggggacaacactcaccgtctcttcag

SEQ ID NO: 2657 - DNA, 367 bp, synthetic construct
  misc_feature 1..367: note = Synthetic construct
  source 1..367: mol_type = other DNA
gaggtccggctggcacagtccggggctgaggtgaagaagcctggggccaccatgaaaatctcctgcaaggcttctggatacattttcaccgactactacatatactgggtgcgacaggcccctggaaaaggacttgagtcgatgggacgtgttgatcctgaggatggtaaaacgatatatggagggaagtttcagggcagaatcaccataaccgcagacacgtctacagacacaacctacatggaactgagcagcctgacatctgaagacacggccgtctattattgtgcaacaaaaggaggattttccaattctcggggagttatgaacttctggggccagggaaccctggtcacagtctcctcag

SEQ ID NO: 2658 - DNA, 355 bp, synthetic construct
  misc_feature 1..355: note = Synthetic construct
  source 1..355: mol_type = other DNA
caggtccagcttgtgcagtctggggctgaggtgaagaagcctggggcctcagtgaaggtttcctgcaaggcttctgaatacatcttcagtaactatgttatatattgggtgcgccaggcccccggacaaaggcttgagtggatgggatggatcaacgctggcaatggtgacacaaaatattcacagatgttccaggacagagtcaccattaccagggacacatccgcgaacacagcctacatggaattggccagcctgagatctgaggacagggcgatatatttctgtgcgagagggggccgatgggatgcttttgatatctggggccaggggacactggtcaccgtctcttcag

SEQ ID NO: 2659 - DNA, 370 bp, synthetic construct
  misc_feature 1..370: note = Synthetic construct
  source 1..370: mol_type = other DNA
caggtgcagctggtgcagtctggggctgaggtgaagaagcctggggcctctgtgaaggtctcctgcaaggcttctggatacaccttcaccaaccatgatatcaactgggtgcgacaggccactggacaagggcttgagtggatgggatacgtgaaccctgacagtggtgccacaggctatgcacagaagttccagggcagagtcaccattaccaggaacacctccataagcgcagccttcatggagctgagcagcctgacacctgaggacacggccgtgtattactgtgcgagagacctcccctatacatattgtggtgatgactgctattccctctggggccagggaaccctggtcaccgtctcctcag

SEQ ID NO: 2660 - DNA, 372 bp, synthetic construct
  misc_feature 1..372: note = Synthetic construct
  source 1..372: mol_type = other DNA
caggtgcagctggtgcaatctggggctgaggtgaagaagcctggggcctcagtgaaggtctcctgcaaggcttctggatacacgttcaccaactatgatatcaactgggtgcgacaggccactggacaagggcttgagtggatgggatggatgaaccctaacagtggtaacacaggctatgcacagaagttccagggcagagtcaccatcaccaggaacaactccataggcacagcctatatggagctgagcagcctgagatctgaggacacggccgtatattattgtgcgaggggcaagcagctcgtccggttccactactactactacatggacgtctggggcaaagggaccacggtcaccgtctcctca

SEQ ID NO: 2661 - DNA, 390 bp, synthetic construct
  misc_feature 1..390: note = Synthetic construct
  source 1..390: mol_type = other DNA
caggtgcagctggtgcagtctggggctgaggtgaagaagcctggggcctcagtgaaggtctcctgcaaggcttctggatacaccttcaccagctatgatatcaactgggtgcgacaggccactggacaagggcttgagtggatgggatggatgaaccctaacagtggtaacacaggctatgcacagaagttccagggcagagtcaccattaccaggaacacctccataagcacagcctacatggagctgagcagcctgagatctgaggacacggccgtgtattactgtgcgagaggcaaagggcttgattacgatattttgactggttgggggtggtactactactacatggacgtctggggcaaagggaccacggtcaccgtctcctca

SEQ ID NO: 2662 - DNA, 384 bp, synthetic construct
  misc_feature 1..384: note = Synthetic construct
  source 1..384: mol_type = other DNA
caggtgcagctggtgcagtctggggctgaggtgaagaagcctggggcctcagtgaaggtctcctgcaaggcttctggatacaccttcaccagctatgatatcaactgggtgcgacaggccactggacaagggcttgagtggatgggatggatgaaccctaacagtggtaacacaggctatgcacagaagttccagggcagagtcaccattaccaggaacacctccataagcacagcctacatggagctgagcagcctgagatctgaggacacggccgtgtattactgtgcgagaggctctagtggttcggggagttattatagctactactactactactacatggacgtctggggcaaagggaccacggtcaccgtctcctca

SEQ ID NO: 2663 - DNA, 361 bp, synthetic construct
  misc_feature 1..361: note = Synthetic construct
  source 1..361: mol_type = other DNA
caggtgcagctggtgcagtctggggctgaggtgaagaagcctggggcctcagtgaaggtctcctgcaaggcttctggatacaccttcaccagctatgatatcaactgggtgcgacaggccactggacaagggcttgagtggatgggatggatgaaccctaacagtggtaacacaggctatgcacagaagttccagggcagagtcaccattaccaggaacacctccataagcacagcctacatggagctgagcagcctgagatctgaggacacggccgtgtattactgtgcgagatcggattactatgatagtagtggttatggtctctggggccagggaaccctggtcaccgtctcctcag

SEQ ID NO: 2664 - DNA, 358 bp, synthetic construct
  misc_feature 1..358: note = Synthetic construct
  source 1..358: mol_type = other DNA
caggtgcagctggtgcagtctggggctgaggtgaagaacactggggcctcagtgaaggtctcctgcaaggcttctggatacaacttcgtcagctatgatatcaactgggtgcgacaggccactggacaagggcttgagtgggtgggatggatgaaccctaatagtggtaacacaggctatgcagagaacttccagggcagagtcaccattaccaggaacacctccataagcacagcctacctggaggtgagcagcctaagatctgaggacacggccgtctattactgtgcgcgagggactatgatcgcgaaaaactttgactcctggggccagggcaccctggtcaccgtctcctcag

SEQ ID NO: 2665 - DNA, 373 bp, synthetic construct
  misc_feature 1..373: note = Synthetic construct
  source 1..373: mol_type = other DNA
caggtgcagctggtgcagtctggggctgaggtgaagaagcctggggcctcagtgagggtctcctgcgaggcttctggatacacctttctcaactatgatatcaactgggtgcgacaggccactggacaagggcttgtctggatgggatggatgaaccctaaaagtggtaacacaggctatgcacagaagttccgcggcagagtcaccattaccaggaacacctctacaaacacgacctacatggagctgaccagcctgacatctgacgacacggccgtgtattactgtgcgagagccggtcggaggccgccctttagtaaccaccctaattttgactcttggggccagggaaccctggtcaccgtctcctcag

SEQ ID NO: 2666 - DNA, 366 bp, synthetic construct
  misc_feature 1..366: note = Synthetic construct
  source 1..366: mol_type = other DNA
caggtgcagctggtgcagtctggggctgaggtgaagaagcctggggcctcagtgaaggtctcctgcgaggcttctggatacaccttcactagctttgatatcaactgggtgcgacaggccagtggacaggggcttgagtggatgggatggatgaaccctaagagtggtgacacaggctatgcacagaagttccagggcagactcaccatttccagggacacctccataagcacagcctacatggagctgagcaacctgagatctgaggacacggccgtgtattactgcgtcgctcggagtcccccagcctacttctactactacatgaatgtctggggcaatgggaccacggtcaccgtctcctca

SEQ ID NO: 2667 - DNA, 358 bp, synthetic construct
  misc_feature 1..358: note = Synthetic construct
  source 1..358: mol_type = other DNA
caggtccagctggtgcagtctggggctgaggtgaagaagcctgggtcctcggtgaaggtctcctgcaaggcttctggagacaccttcagcagttttgctatcaactgggtgcgacaggcccctggacaagaacttgagtggatgggaggcatcatccctatccttggcacatcaaactacgcacagaactttcagggcagagtcacaatcaccacggacgaatccacgagcacaacctacatggagctgagcagcctgagatctgaggacacggccgtgtatttttgtgcgaggacaaattacggtgaccaatattttgactactggggccagggaaccctggtcaccgtctcctcag

SEQ ID NO: 2668 - DNA, 376 bp, synthetic construct
  misc_feature 1..376: note = Synthetic construct
  source 1..376: mol_type = other DNA
caggtccagttggtgcagtctggggctgaggtgaagaagcctgggtcctcggtgaaggtctcctgccaggcttctggaggcaccttcagtagtgatgctatcaactgggtgcgacaggcccctggacaagggcttgagtggatgggagggattgttccgatgtttggaacaactaactacgcacggaagttccagggcagagtcacgattaccgcggacgaatccacgaacacagtctacatggacttgcgcagcctgacgtctgaagacacggccacatacttctgtgcgagagcgccggggattgtggcggtcagagccacggagggctggtacgacccctggggccagggaaccctggtcaccgtctcctcag

SEQ ID NO: 2669 - DNA, 373 bp, synthetic construct
  misc_feature 1..373: note = Synthetic construct
  source 1..373: mol_type = other DNA
caggtgcagctggtgcagtctggggctgaggtgaagaagcctggggcctcagtgaaggtctcctgcaaggcttctggatacaccttcaccagctatgatatcaactgggtgcgacaggcccctggacaagggcttgagtggatgggatggatgaaccctaacagtggtaacacaggctatgcacagaagttccagggcagagtcaccattaccagggactcctccataagcacagcctacatggatctgagcagcctgagatctgaggacacggccgtgtattactgtgcgagagaggtcggttgtagtggtattaactgccagggctggttcgacccctggggccagggaaccctggtcaccgtctcctcag

SEQ ID NO: 2670 - DNA, 385 bp, synthetic construct
  misc_feature 1..385: note = Synthetic construct
  source 1..385: mol_type = other DNA
caggttcagctggtgcagtctggagctgaggtgaagaagcctggggcctcagtgaaggtctcctgcaaggcttctggttacacttttaccagctatggtatcaactgggtgcgacaggcccctggacaagggcttgagtggatgggatggatcagcgctgacaatggtaacacaaactatgcacagaagctccagggcagagtcaccatgaccacagacacatccacgaagacagcctacatggagctgaggagcctgagatctgacgacacggccgtgtattactgtgcgagagagaaaattgggcccaaaacttacgatattttgactggttacactatctttgactactggggccagggaaccctggtcaccgtctcctcag

SEQ ID NO: 2671 - DNA, 364 bp, synthetic construct
  misc_feature 1..364: note = Synthetic construct
  source 1..364: mol_type = other DNA
caggtccagctggtgcagtctggggctgaggtgaagaagcctgggtcctcggtgaaggtctcctgcaaggcttctggaggcaccttcagcaactatgctatcaactgggtgcgacaggcccctggacaaggtcttgagtggatgggagggatcatccctatctttgctacagcaaactacgcacagaagttccagggcagagtcacgattaccgcggacgaatccatgaacacagtctacatggagctcagcagcctgagatctgaagacacggccgtctattattgtgcgagaggggggtatgattacctttgggggagtcatgggtactggggccagggaaccctggtcaccgtctcctcag

SEQ ID NO: 2672 - DNA, 370 bp, synthetic construct; identical to SEQ ID NO: 1766
  misc_feature 1..370: note = Synthetic construct
  source 1..370: mol_type = other DNA

SEQ ID NO: 2673 - DNA, 376 bp, synthetic construct
  misc_feature 1..376: note = Synthetic construct
  source 1..376: mol_type = other DNA
caggtgcagctggagcaatctgggtctgagtttaagaagcctggggcctcagtgaagatttcctgcaaggcttctggatacagtttcacgacctatgctatcaattgggtgcgacaggcccctggacaaggacttgagtttatgggatggatcaaccccaacagtggaaagccaacctatgcccaggacttcacaggacggtttgacttctccttggattcctctgcgagcacggcatatctgcagatcagcagtctccaggctgacgacactgccatctattactgtgcgagagatctatggtatgattttgatagcagtgctgcggggtcccttgacgactggggccagggaaccctggtcaccgtctcctcag

SEQ ID NO: 2674 - DNA, 346 bp, synthetic construct
  misc_feature 1..346: note = Synthetic construct
  source 1..346: mol_type = other DNA
caggtccagttggtgcagtctggggctgaggtgaagaagcctgggtcctcggtgaaggtctcctgcaaggcttctggaggcaccttcagcagctattctatcacctgggtgcgacaggcccctggacaagggcttgagtggatgggaaagatcttctttcaaacacccacctacgcacagaaattccagggcagagtcacctttaccacggacgtgtctacgagtacagactacctggagctgagcagcctgagatctgacgacacggccgtctattactgtgcgacagacctaggagcaccttcggggcactggggccagggaaccctggtcaccgtctcctcag

SEQ ID NO: 2675 - DNA, 367 bp, synthetic construct
  misc_feature 1..367: note = Synthetic construct
  source 1..367: mol_type = other DNA
caggtccagctggtgcagtctggggctgaggtgaagaagcctgggtcctcggtgaaggtctcctgcaaggcttctggaggctccttcagcagctttgctatcacctgggtgcgacaggcccctggacaagggcttgagtggatgggagggatcatccccagctttggaacagcgaactacgcacagaagttgcaggacagagtcacgattaccacggacgaatccacgaccacagcctacatggagctgcgcagcctgacatctgaggacacggccatgtattactgtgcgatagatgtgggggctactgggggggcctactactttgactactggggccagggaaccctggtcaccgtctcctcag

SEQ ID NO: 2676 - DNA, 385 bp, synthetic construct
  misc_feature 1..385: note = Synthetic construct
  source 1..385: mol_type = other DNA
caggtccagctggtgcagtctggggctgaggtgaaggagcctgggtcctcggtgaaggtctcctgcaaggcttctagaggcaccttcagcagctatgctatcacctgggtgcgacaggcccctggacaagggcttgagtggatgggagggatcatccctatctttggtacagcagactacgcacagaagttccagggcagagtcacgattaacacggacgaatccacgagcacagcctacatggaactgagtagcctgagatctgaggacacggccgtctattactgtgcgagatgtcgtgtaggtcggacaagtatgtctcagcccctaatcggggctgcttttgatatctggggccgagggacaatggtcaccgtctcttcag

SEQ ID NO: 2677 - DNA, 352 bp, synthetic construct
  misc_feature 1..352: note = Synthetic construct
  source 1..352: mol_type = other DNA
caggttcacctggtgcagtctggcgctgaagtgaagaagcctggggcctcagtgaaagtctcctgcaagacttctggttacacctttaccgactatggtatcacctgggtgcgacaggcccctggacaagggcttgagtggatgggatggatcagcgcttccactgcgaacacaaagtatgcacagaagttccaggacagagtcaccttgaccaccgacacatcttcgagcacagcctacatggaactgagggagttgagagttgacgacacggccctgtattattgtgcgagagcaaggtacactgtggatgactactggggccagggaaccctggtcaccgtctcctcag

SEQ ID NO: 2678 - DNA, 390 bp, synthetic construct
  misc_feature 1..390: note = Synthetic construct
  source 1..390: mol_type = other DNA
caggttcagctggtgcagtctggagctgaggtgaagaagcctggggcctcagtgaaggtctcctgcaaggcttctggttacacccttaacaactatggtatcacctgggtgcgacaggcccctggacaagggcttgagtggatgggatggatcagcggtaataatgataacacaaactatgcacagaagttccagggcagagtcgccttgaccacagacacatccacgagcacagcctacatggagctgaggagcctgagatctgacgacacggccgtgtattactgtgcgagagatggaaattacgatttttggagtggttataacccttttgggtactaccactacatggacgtctggggcaaagggaccacggtcaccgtctcctca

SEQ ID NO: 2679 - DNA, 366 bp, synthetic construct
  misc_feature 1..366: note = Synthetic construct
  source 1..366: mol_type = other DNA
caggtccagctggtgcaatctggggctgaggtgaagaagcctgggtcctcggttaaggtctcctgcaaggcttctggaggcaccttcagcagccatgctatcacctgggtgcgacaggcccctggacaagggcttgagtggatgggtgggatcatccctttccttgctagagcaaactccgcagagaagttccaggacagagtcacgattaccgcggacgaatccacgagcacagcctacatggagctgagcagcctgagatctgatgacacggccgtgtattactgtgcgagagccccttcggacgcccattactattactatatggacgtctggggcaaagggaccacggtcaccgtctcctca

SEQ ID NO: 2680 - DNA, 382 bp, synthetic construct
  misc_feature 1..382: note = Synthetic construct
  source 1..382: mol_type = other DNA
caggttcagctggtgcagtctggagctgaggtgaacaagcctggggcctcagtgaaggtctcctgtagggcttttggtttcaccatttccagttatggtatcacctgggtgcgacaggcccctggacaggggcttgagtggatgggatggatccgcgctgacattggtgacacaaattatgcacagaagttccaggacagaaccaccatgaccacagacacatccacgaacacagcctacatggagctgaggagcctgagatctgacgacacggccgtatattactgtgcgagggaaaattacattttacgatatttaccggtggcccggcggggcgctgttgatatctggggccaagggacgatggtcaccgtctcctcag

SEQ ID NO: 2681 - DNA, 373 bp, synthetic construct
  misc_feature 1..373: note = Synthetic construct
  source 1..373: mol_type = other DNA
caggttcagctggtgcaatctggaggtgaggtgaagaagcctggggcctcagtgaaggtctcctgcaaggcttctggttacaccttaacaagttatggtatcacctgggtgcgacaggcccctggacaggggcttgagtggctgggatggatcagcctttacaatggtgccacaaactatgcacagaacctccagggcagagtcaccatgaccgcagacacatccacgcgcacagcctacatggaactgaggagcctgagatttgacgacgcggccgtctattactgtgctatcttaacattttacgatattttgagtggcccctactcgtttgacttctggggccagggaaccctggtcaccgtctcctcag

SEQ ID NO: 2682 - DNA, 370 bp, synthetic construct
  misc_feature 1..370: note = Synthetic construct
  source 1..370: mol_type = other DNA
caggtccaactggtgcagtctggggctgaggtgaagaagccggggtcctcggtgaaggtctcctgcaaggctcctggagacaccttcaacaattatgttatcacgtgggtgcgacaggcccctggacaacggcctgagtggatgggggggttcatccccatttttggcacaacgaactacgaacagaagttgcagggcagagtcacgattaccgcggacggatctacgggcacagcctacatggagctgagaaacctgacatatgaggacacggccgtctattattgtgcgagagatggggcccggatagtgggactgactcatgcacttgatatttggggccaagggacagtggtcaccgtctcttcag

SEQ ID NO: 2683 - DNA, 376 bp, synthetic construct
  misc_feature 1..376: note = Synthetic construct
  source 1..376: mol_type = other DNA
caggtgcagctggtgcagtcaggagccgaggtgaagaaaccaggcagctccgtgaaggtcagctgcaaagcttccggggtgacatctagtaactaccccatcacttgggtccgacaggcacctggacagggactggaatggatgggaggagtgctgccactgttcggagtcaccaactacgcccagaagtttcagggaagggtgacaatttctgcagacaaaagtaccaatacagcctatatggagctgtcaagcctgcgctctgaagataccgccgtgtactattgtgctcggggaaagagacccggctactgcagcggaggcgtctgttcctctgaatattggggccaggggactctggtgaccgtctcctcag

SEQ ID NO: 2684 - DNA, 376 bp, synthetic construct
  misc_feature 1..376: note = Synthetic construct
  source 1..376: mol_type = other DNA
caggtgcagctggtgcagtcaggagccgaggtgaagaaaccaggcagctccgtgaaggtcagctgcaaagcttccggggtgacatctagtaactaccccatcacttgggtccgacaggcacctggacagggactggaatggatgggaggagtgctgccactgttcggagtcaccaactacgcccagaagtttcagggaagggtgacaatttctgcagacaaaagtaccaatacagcctatatggacctgtcaagcctgcgctctgaagataccgccgtgtactattgtgctcggggaaagagacccggctactgcagcggaggcgtctgttcctctgactattggggccaggggactctggtgaccgtctcctcag

SEQ ID NO: 2685 - DNA, 376 bp, synthetic construct
  misc_feature 1..376: note = Synthetic construct
  source 1..376: mol_type = other DNA
caggtgcagctggtgcagtcaggagccgaggtgaagaaaccaggcagctccgtgaaggtcagctgcaaagcttccggggtgacatctagtaactaccccatcacttgggtccgacaggcacctggacagggactggaatggatgggaggagtgctgccactgttcggagtcaccaactacgcccagaagtttcagggaagggtgacaatttctgcagacaaaagtaccaatacagcctatatggagctgtcaagcctgcgctctgaagataccgccgtgtactattgtgctcggggaaagagacccggctactgcagcggaggcgtctgttcctctgactattggggccaggggactctggtgaccgtctcctcag

SEQ ID NO: 2686 - DNA, 376 bp, synthetic construct
  misc_feature 1..376: note = Synthetic construct
  source 1..376: mol_type = other DNA
caggtgcagctggtgcagtcaggagccgaggtgaagaaaccaggcagctccgtgaaggtcagctgcaaagcttccggggtgacatctagtaactaccccatcacttgggtccgacaggcacctggacagggactggaatggatgggaggagtgctgccactgttcggagtcaccaactacgcccagaagtttcagggaagggtgacaatttctgcagacaaaagtaccaatacagcctatatggagctgtcaagcctgcactctgaagataccgccgtgtactattgtgctcggggaaagagacccggctactgcagcggaggcgtctgttcctctgactattggggccaggggactctggtgaccgtctcctcag

SEQ ID NO: 2687 - DNA, 376 bp, synthetic construct
  misc_feature 1..376: note = Synthetic construct
  source 1..376: mol_type = other DNA
caggtgcagctggtgcagtcaggagccgaggtgaagaaaccaggcagctccgtgaaggtcagctgcaaagcttccggggtgacatctagtaactaccccatcacttgggtccgacaggcacctggacagggactggaatggatgggaggagtgctgccactgttcggagtcaccaactacgcccagaagtttcagggaagggtgacaatttctgcagacaaaagtaccaatacagcctatatggagctgtcaagcctgcattctgaagataccgccgtgtactattgtgctcggggaaagagacccggctactgcagcggaggcgtctgttcctctgactattggggccaggggactctggtgaccgtctcctcag

SEQ ID NO: 2688 - DNA, 376 bp, synthetic construct
  misc_feature 1..376: note = Synthetic construct
  source 1..376: mol_type = other DNA
caggtgcagctggtgcagtcaggagccgaggtgaagaaaccaggcagctccgtgaaggtcagctgcaaagcttccggggtgacatctagtaactaccccatcacttgggtccgacaggcacctggacagggactggaatggatgggaggagtgctgccactgttcggagtcaccaactacgcccagaagtttcagggaagggtgacaatttctgcagacaaaagtaccaatacagcctatatggagctgtcaagcctgcgctctgaagataccgccgtgtacttttgtgctcggggaaagagacccggctactgcagcggaggcgtctgttcctctgactattggggccaggggactctggtgaccgtctcctcag

SEQ ID NO: 2689 - DNA, 373 bp, synthetic construct
  misc_feature 1..373: note = Synthetic construct
  source 1..373: mol_type = other DNA
caggtccacctggtgcagtctggggctgaagtgaagaagcctgggtcgtcggtaaaggtctcttgcaaggcttctggaggcaccttcagcagtttttccatcagctgggtgcgacaggcccccggccaagggcttgagtggatgggaggggtcatccctatgtttggtgcaacaaacttcgcacagaagttccagggcagagtcacgattagtacggacgacctcgctaggacagtgtacatggagctgagcagcctgagatctgacgacacggccgtatactactgcgcgagacacccggctacatcaatggctggcatgtggggttacattgacacctggggccagggaaccctggtcaccgtctcctcag

SEQ ID NO: 2690 - DNA, 372 bp, synthetic construct
  misc_feature 1..372: note = Synthetic construct
  source 1..372: mol_type = other DNA
caggttcaacttgtgcagtctggagctgaggtgaagaagcctggggcctcagtgaaggtctcctgtaaggcttctggttacaccttcaccaactttggtatcagctgggtgcgacaggcccctggacaaggccttgagtggatgggatggatcaactcttacaatggtaacacaaactatgcacagaatctgtacgacagagtcagcatgaccacagacacaaccacgaacacagccgacatggagctgaggagcctgacatctgacgacacggccgtgtattactgtgcgagagtggtgggcgtccgacactgggagcagttctactacatggacgtctggggcaaagggaccacggtcaccgtctcctca

SEQ ID NO: 2691 - DNA, 346 bp, synthetic construct
  misc_feature 1..346: note = Synthetic construct
  source 1..346: mol_type = other DNA
caggtccaactggtgcagtctggggctgaggtgaagaagcctgggtcctcggtgaaggtctcctgcaaggcttctggaggcaccttcagcagttttgctatcagctgggtgcgacaggcccctggacaagggctcgagtggatgggagggctcacccctatttttggaactgctaactatgcacagaagtttcagggcagagtcacgattaccgcggacgaatcttcgagcacagtctacattgaagtgagcagactgagatctgaggacacggccgtgtattactgtgtgagacgcccctggttcgacccctggggccagggaaccctggtcaccgtctcctcag

SEQ ID NO: 2692 - DNA, 391 bp, synthetic construct
  misc_feature 1..391: note = Synthetic construct
  source 1..391: mol_type = other DNA
caggtccagttggtgcagtctggggctgaggtgaagaagactgggtcctcggtgaaggtctcctgcaaggcctctggaggcatgttcaattcctatgctatcagctgggtgcgacaggcccctggacaagggcttcagtggatgggagggatcatccctctctttggtacaacaacttatgcacaagagttccagggcagagtcacgattaattcggacgaatccacgaccacagcctttatggaactgaacagcctgagatctgaggacacggccgtgtattactgtgcgacagagggcaaaggcgcaagtaaggcatattgtggggatgagtgctccttctcattctttgaccagtggggccagggaaccctggtcatcgtctcctcag

SEQ ID NO: 2693 - DNA, 381 bp, synthetic construct
  misc_feature 1..381: note = Synthetic construct
  source 1..381: mol_type = other DNA
caggtccagctggtgcagtcaggggctgaggtgaagaagcctgggtcctcggtgaaggtctcctgcaaggcttctggaggcaccttcagcagctatgcaatcagctgggtgcgacaggcccctggacaagggcttgagtggatgggagggatcatccctctctttggttcaggaaactacgcgcagaagttccagggcagagtcacgataaccgcggacgtatccacgaatacagtctacatggagatcagcagcctgagatctgaggacacggccgtgtattactgtgcgagcctagatgaaagacgaggatacagctatggttaccacttctattacatggacgtctggggcaaagggaccacagtcaccgtctcctca

SEQ ID NO: 2694 - DNA, 376 bp, synthetic construct
  misc_feature 1..376: note = Synthetic construct
  source 1..376: mol_type = other DNA
caggtccagctggtgcagtctggggctgaggtgaagaagcctgggtcctcggtgaaggtctcctgcaaggcttctggaggcaccttcagcaactatgctatcagctgggtgcgacaggcccctggacaagggcttgagtggatgggagggatcatccctatctttggtacaacaaactacgcacagaagttccagggcagagtcacgattaccacggacgaatccacgagcacagcctacatggagttgagcagcctgagatctgaggacacggccgtgtattactgtgcgagagacttaggtatagcagtggctggtaagagggacgatgcttttgatatctggggccaagggacaatggtcaccgtctcttcag

SEQ ID NO: 2695 - DNA, 378 bp, synthetic construct
  misc_feature 1..378: note = Synthetic construct
  source 1..378: mol_type = other DNA
caggtccagctggtgcagtctggggctgaggtgaagaagcctgggtcctcggtgaaggtctcctgcaaggcttctggaggcaccttcagcagctatgctatcagctgggtgcgacaggcccctggacaagggcttgagtggatgggagggatcatccctatctttggtacagcaaactacgcacagaagttccagggcagagtcacgattaccacggacgaatccacgagcacagcctacatggagctgagcagcctgagatctgaggacacggccgtgtattactgtgcgagagagcaaggtcccgaatatagtgggagctactactactactacatggacgtctggggcaaagggaccacggtcaccgtctcctca

SEQ ID NO: 2696 - DNA, 373 bp, synthetic construct
  misc_feature 1..373: note = Synthetic construct
  source 1..373: mol_type = other DNA
caggtccagctggtgcagtctggggctgaggtgaagaagcctgggtcctcggtgaaggtctcctgcaaggcttctggaggaaccttcagcagctatagtatcagctgggtgcgacaggcccctggacaagggcttgagtggatgggagggatcatcgctgtctttggtacaccagagtacgcacagaagttccagggcagagtcacgattaccacggacgaatccacgagcacagcctacatggacctgagtagcctgagatctgaggacacggccgtgtatttctgtgcgttcagcgattactctgatagtagcggctattacttcttttttgactactggggccagggaaccctggtcaccgtctcctcag

SEQ ID NO: 2697 - DNA, 393 bp, synthetic construct
  misc_feature 1..393: note = Synthetic construct
  source 1..393: mol_type = other DNA
caggtccagctggtgcagtctggggctgaggtgaagaagcctgggtcctcggtgaaggtctcctgcacggcttctggaggcacctttagcagttatgctatcagctgggtgcgacaggcccctggacaagggcttgagtggatgggagggatcatccctatgtctggtacagccaactacgcacagaagttccagggcagagtcacgattaccacggacgaatccacgaagacagcctacatggagctgagcagcctgagatctgaggacacggccgtgtattactgtgcgagaccctcgggtagggattactctcgttatggttcgggggggcgaaacttctactactacatggacgtctggggcaaagggaccacggtcaccgtctcctca

SEQ ID NO: 2698 - DNA, 376 bp, synthetic construct
  misc_feature 1..376: note = Synthetic construct
  source 1..376: mol_type = other DNA
cagattcagctggtgcagtctggaggtgaggtgaagaagcctggggcctcagtgaaggtctcctgcaaggcttctggttacacctttaggaactatggtatcagctgggtgcgacaggcccctggacaagggcttgagtggatgggatggatcagcgcttacaatggtgacacagtctatgcacagaacctccagggcagagtcaccgtgaccgtagacacatccacgagcacagtctacatggagctgaggagccttagatctgacgacacggccgtctattactgtgcgagagacggggagtattgtggtactgcctgctccatcaactggttcgacccctggggccagggaaccctggtcagtgtctcctcag

SEQ ID NO: 2699 - DNA, 364 bp, synthetic construct
  misc_feature 1..364: note = Synthetic construct
  source 1..364: mol_type = other DNA
caggttaagatggtgcagtctggagctgaggtgaagaagcctggggcctcagtgaaggtctcctgcaaggcttctggttacagcttttccagttatggtatcagctgggtgcgacaggcccctggacaagggcttgagtggatgggatggatcagctacaatggtaatataaactatggacagaaattccagggcagagtcaccatgaccacagacacatcgacgagtacagcctacatggaactgaggagcctgagatctgacgacacggccgtgtattattgtgcgagagatttccaggcgtcgatggtgagtcctagggtcgcctactggggccagggaaccctggtcaccgtctcctcag

SEQ ID NO: 2700 - DNA, 355 bp, synthetic construct
  misc_feature 1..355: note = Synthetic construct
  source 1..355: mol_type = other DNA
caggttcagctggtgcagtctggagctgaggtgaagaagcctggggcctcagtgaaggtctcctgcaaggcctctggttacagctttaccaactatggtatcagctgggtgcgacaggcccctggacaagggcttgagtggatgggatggatcagcgcttacaatggtaacacaaactatgcacagaaggtccagggcagagtcaccatgaccacagacacatccacgagcacagcctatatggagctgagtagcctgagatctgacgacacggccgtgtattactgtgcgagagccgactacggttcctctctggacgtctggggcaaagggaccacggtcaccgtctcctcag

SEQ ID NO: 2701 - DNA, 373 bp, synthetic construct
  misc_feature 1..373: note = Synthetic construct
  source 1..373: mol_type = other DNA
caggttcagctggtgcagtctggagctgaggtgaagaagcctggggcctcagtgaaggtctcctgcaaggcttctggttacacctttaccagctatggtatcagctgggtgcgacaggcccctggacaagggcttgagtggatgggatggatcagcgcttacaatggtaacacaaactatgcacagaagctccagggcagagtcaccatgaccacagacacatccacgagcacagcctacatggagctgaggagcctgagatctgacgacacggccgtgtattactgtgcgagagattcagtagtaccagctgctatggagggcaactggttcgacccctggggccagggaaccctggtcaccgtctcctcag

SEQ ID NO: 2702 - DNA, 355 bp, synthetic construct
  misc_feature 1..355: note = Synthetic construct
  source 1..355: mol_type = other DNA
caggttcagctggtgcagtctggagctgaggtgaagaagcctggggcctcagtgaaggtctcctgcaaggcttctggttacacctttaccagctatggtatcagctgggtgcgacaggcccctggacaagggcttgagtggatgggatggatcagcgcttacaatggtaacacaaactatgcacagaagctccagggcagagtcaccatgaccacagacacatccacgagcacagcctacatggagctgaggagcctgagatctgacgacacggccgtgtattactgtgcgagagctgaccttaatggtgcttttgatatctggggccaagggacaatggtcaccgtctcttcag

SEQ ID NO: 2703 - DNA, 361 bp, synthetic construct
  misc_feature 1..361: note = Synthetic construct
  source 1..361: mol_type = other DNA
caggttcagctggtgcagtctggagctgaggtgaagaagcctggggcctcagtgaaggtctcctgcaaggcttctggttacacctttaccagctatggtatcagctgggtgcgacaggcccctggacaagggcttgagtggatgggatggatcagcgcttacaatggtaacacaaactatgcacagaagctccagggcagagtcaccatgaccacagacacatccacgagcacagcctacatggagctgaggagcctgagatctgacgacacggccgtgtattactgtgcgagaggggaagtgggagctacggtccggtttgactactggggccagggaaccctggtcaccgtctcctcag

SEQ ID NO: 2704 - DNA, 391 bp, synthetic construct
  misc_feature 1..391: note = Synthetic construct
  source 1..391: mol_type = other DNA
caggttcagctggtgcagtctggagctgaggtgaagaagcctggggcctcagtgaaggtctcctgcaaggcttctggttacacctttaccagctatggtatcagctgggtgcgacaggcccctggacaagggcttgagtggatgggatggatcagcgcttacaatggtaacacaaactatgcacagaagctccagggcagagtcaccatgaccacagacacatccacgagcacagcctacatggagctgaggagcctgagatctgacgacacggccgtgtattactgtgcgagagtcgtaaagggaaaacagtattacgatattttgactggttattatgagaactggttcgacccctggggccagggaaccctggtcaccgtctcctcag

SEQ ID NO: 2705 - DNA, 381 bp, synthetic construct
  misc_feature 1..381: note = Synthetic construct
  source 1..381: mol_type = other DNA
caggttcagctggtgcagtctggagctgaggtgaagaagcctggggcctcagtgaaggtctcctgcaaggcttctggttacacctttaccagctatggtatcagctgggtgcgacaggcccctggacaagggcttgagtggatgggatggatcagcgcttacaatggtaacacaaactatgcacagaagctccagggcagagtcaccatgaccacagacacatccacgagcacagcctacatggagctgaggagcctgagatctgacgacacggccgtgtattactgtgcgagatctgaacatccctttgactggttattctgttgcgactactactacatggacgtctggggcaaagggaccacggtcaccgtctcctca

SEQ ID NO: 2706 - DNA, 358 bp, synthetic construct
  misc_feature 1..358: note = Synthetic construct
  source 1..358: mol_type = other DNA
caggttcagctggtgcagtctggaggtgaggtgaagaagcctggggcctcagtgagggtctcctgcaaggcttctggttacacctttaccagctatggtatcagctgggtgcgacaggcccctggacaagggcttgagtgggtgggatggatcaacacttactatggtcacacaaactatgcacagaaactccagggcagagtcaccatgaccacagacacatccacgagtacagcctacatggagctgacgagcctgaaatctgacgacacggccgtgtattactgtgcgagagtatcgcccgcgacaatgcgggcagtctactggggccagggaaccccggtcaccgtctcctcag

SEQ ID NO: 2707 - DNA, 388 bp, synthetic construct
  misc_feature 1..388: note = Synthetic construct
  source 1..388: mol_type = other DNA
caggtccagctggtacaatctggggctgaggtgaagaagccggggtcctcggtgaaggtctcctgcacggcttctggaggcgccttcagtgcctattcaatcagctgggtgcgacaggcccctggacaaggtcttgagtggatgggagggatcatccctctctttggtgcaccaaattatgcagtgaatttccaggacagagtcaccctcaccacggacgaatccacgaacactgcctacatggaactgagcgaccttaaatctgacgacacggccgtctatttctgtgcggaggactcattttgtggtgatgactgctctcgataccagactcggaggggggcttttaatgtctggggccaagggacagtagtcaccgtctcttcag

SEQ ID NO: 2708 - DNA, 361 bp, synthetic construct
  misc_feature 1..361: note = Synthetic construct
  source 1..361: mol_type = other DNA
caggttcagctggtgcagtctggagctgaggtgaagaagcctggggcctcagtgaaggtctcctgcaaggcttctggttacacttttaccagttatggtatcagctgggtgcgacaggcccctggacaaggtcttgagtggatgggatggatcagcgcttacaatggtgacacaaactatgcacagaaactccagggcagagtcaccatgaccacagacacatccacgagcacggcctacatggagctgaggagcctgagatctgacgacacggccctgtattactgtgcgagaggggattactttgatagtatcggtttacggtactggggccagggaaccctggtcaccgtctcctcag

SEQ ID NO: 2709 - DNA, 358 bp, synthetic construct
  misc_feature 1..358: note = Synthetic construct
  source 1..358: mol_type = other DNA
caggtccaactggtacaatctggggctgaggtgaagaagcctgggtcctcggtgaaagtctcctgcaaggcttccggaggcgccttcagtaggtatgttatcagctgggtgcgacaggcccctggacaggggcttgagtggatgggaaacatcatctgtatctctgaagcaccagagtacgcacagagtttccaggacagactcacgattacggcggacaagtccacgaacaccgtgtacatggacttgagtagcctgacatctgaggacacggccgtttacttctgtgcgagggaatcgggaggcttttcgggttttgacttctggggccagggaacccgggtcaccgtctcctcag

SEQ ID NO: 2710 - DNA, 349 bp, synthetic construct
  misc_feature 1..349: note = Synthetic construct
  source 1..349: mol_type = other DNA
caggtccagctggtgcagtctggggctgaggtgaagaagcctgggtcctcggtgaaggtctcctgcaaggcttctggaggcaccctcgggaactatgctatcagctgggtgcgacaggcccctggacaggggcttgagtggctgggagggatcatccctatctttgctacaacacactacgcacagaagttccagggcagagttacgattaccgcggacgaatccacgagcacagcctacatggagctgaccagcctgacatctgaagacacggccctttattactgtgcgagagaagtagggtggttcgacccctggggccagggaaccctggtcaccgtctcctcag

SEQ ID NO: 2711 - DNA, 364 bp, synthetic construct
  misc_feature 1..364: note = Synthetic construct
  source 1..364: mol_type = other DNA
caggttcagctggtgcagtccggagctgaggtgaagaagcctggggcctcagtgagggtctcctgcacggcctctggttatagcttttccagttttggcatcagctgggtgcgacaggcccctgggcaagggcttgagtggatgggatggattagcggtgacaatggcaacacaaattatgcacagaggatccaggacagagtcaccatgaccacagacacatcaacggacacagtctacatggacttgaggagcctgacatctgacgacacggccgtctattactgtgcgagagaatcctcgttcgggtgggacaatgtcttggacctttggggccagggaaccctggtcaccgtctcctcag

SEQ ID NO: 2712 - DNA, 370 bp, synthetic construct
  misc_feature 1..370: note = Synthetic construct
  source 1..370: mol_type = other DNA
caggtccagttggtgcagtctggggctgaggtgatgcagcctgggtccgcggtgaaggtctcctgcgaggcttctggaggcaacttcaacaaccttgttatcagctgggtgcgacaggtccctggacaagggcttgagtggatgggagggatcatcccgatctttggtacggtgaactacgcacagaagttccggggcagagtcacgataaccaaggacgaatccacgagcacagcctacatggagctgagcagcctgagatatgaagacacggccgtctattactgtgcaaatttattttgtgggggtggtaggtgctattccctgtttgactactggggacagggaaccctggtcgccgtctcctcag

SEQ ID NO: 2713 - DNA, 375 bp, synthetic construct
  misc_feature 1..375: note = Synthetic construct
  source 1..375: mol_type = other DNA
caggtccagttggtgcagtctggggctgaggtgatgcagcctgggtccgcggtgaaggtctcctgcgaggcttctggaggcaacttcaacaaccttgttatcagctgggtgcgacaggtccctggacaagggcttgagtggatgggagggatcatcccgatctttggtacggtgaactacgcacagaagttccggggcagagtcacgataaccaaggacgaatccacgagcacagcctacatggagctgagcagcctgagatatgaagacacggccgtctattactgtgcgaagagatctgggtgggagtacggggggcgttcttcgtactacatggacgtctggggcagcgggaccacggtaatcgtctcctcg

SEQ ID NO: 2714 - DNA, 364 bp, synthetic construct
  misc_feature 1..364: note = Synthetic construct
  source 1..364: mol_type = other DNA
caggtccagctggtgcagtctggggctgaaatgaagaagcctgggtcctcggtgaaggtctcctgcaaggcctctggaggcaccttcagcacctctggaatcagctgggtgcgccaggcccccggacaagggcttgagtggatgggaggaatcatccctatccatggtacagtggataaggcacagaagttccagggcagagtcacatttaccgcggacgactccacgagcacggcctacatggaattgagcagcctgagatctgaagacacggccgtctattactgtgcgagagatcaggggatacagattcgtgatgcttttgatctctggggccaagggacattgctcaccgtctcttcag

SEQ ID NO: 2715 - DNA, 375 bp, synthetic construct
  misc_feature 1..375: note = Synthetic construct
  source 1..375: mol_type = other DNA
caggttcagttggtgcagtctggaggcgaggtgaggaagcctggggcctcactgaaggtctcctgccaggcttctggctacactttcaatagatacggtatcagctgggtgcggcaggcccctggacaagggcttgagtggctgggctggataagcgcttacgacgggcgcacaacttacgcagagaagtttaagggcagagtcaccttgaccacagacacatccacgaccacagcctacatggaactgaggagcctgagatctgacgacacggccatatacttctgtgcgagagaggcagttacggttcggggaattggcttctactaccacatggacgtctggggcaagggggcctcggtcaccgtctcctca

SEQ ID NO: 2716 - DNA, 367 bp, synthetic construct
  misc_feature 1..367: note = Synthetic construct
  source 1..367: mol_type = other DNA
caggtgcagctggtgcagtctggggctgaggtgaagaagcctgggtcctcggtgaaggtctcctgcaaggcttctggaggcaccttcagcaactctgctatcagctgggtgcgtcaggcccctggacgagggcttgaatggatgggagggatcatccccatctttggaacaacaaacaacgcacagaaattccaggccagagtcacccttaccgcggacgaagcaacgaacacagcctacatggagctgagcagcctccaatttgaggacactgccatatattactgtgcgagaggcctagtgggacctcctatttcttcgtacctcgatctctggggccgtgggaccctggtcactgtctcctcag

SEQ ID NO: 2717 - DNA, 385 bp, synthetic construct
  misc_feature 1..385: note = Synthetic construct
  source 1..385: mol_type = other DNA
caagttgagatggtacagtcaggagctgaggtgaagaagcctggggcctcagtgaaggtctcctgcaaggcttctggttacacctttaccaactatggtatcagttgggtgcgacaggcccctggacaagggcttgagtggatgggatggatccgcccttacaatggtcagacaaactatgtccagagtctccagggcagagtcacaatgaccacagacacagccacgaacacagcctacatggagctgaggagcctgcgatctgacgacacggccgtctatttctgtgcgagaacatattgtggtggtgattgctatttgaggggttggatccctgtttcttttgatatctggggccaagggacaatggtcaccgtctcttcag

SEQ ID NO: 2718 - DNA, 364 bp, synthetic construct
  misc_feature 1..364: note = Synthetic construct
  source 1..364: mol_type = other DNA
caggttcagctggtgcagtctggagctgaggtgaagaagcctggggcctcagtgaaggtctcctgcaaggcttctggttacacctttatcaactatggtatcagttgggtgcgacaggcccctggacaagggcttgagtggatgggatggataaccacttacaatggtaacacaaactatgcacagaggctccagggcagagtcaccatgaccacagatacatccacgaacacagcctacatggagctgaggagcctgagatctgacgacacggccgtgtattactgtgcgagagactccaaacgtattagtctgtctcaggaagactactggggccagggaaccctggtcaccgtctcctcag

SEQ ID NO: 2719 - DNA, 370 bp, synthetic construct
  misc_feature 1..370: note = Synthetic construct
  source 1..370: mol_type = other DNA
caggtccagctggtgcagtctggggctgaggtgaagaggcctgggtcctcggtgacgatctcctgcaagacttctggaggcaccttcggctcctatgcaatcatctgggtgcggcaggcccctggacaaggccttgagtggatgggaggaatcatccctatctttggtactccacactacgcgcaggacttccagggcagagtcaccattacttcggacgaatcgacgagctcagcctacatgcagttgagcagcctcaggtctgacgacacggccgtatacttctgtgcgagagccgccgagtcggctacatctactcactggtacttcgatctctggggccttggcacccaggtcactgtcgcctcag

SEQ ID NO: 2720 - DNA, 358 bp, synthetic construct
  misc_feature 1..358: note = Synthetic construct
  source 1..358: mol_type = other DNA
caggtgcagttgctgcaatctgggtctgaggtggagaggcctggggcctcagtgaaggttgcctgcaaggcttccggatacactttcactactcatgcaatcatgtgggtccgacaggcccctggagaaggacttcagtggatgggatggatgaacaccaacactgggcagccaacctatgccccgggcttcagaggacggattgtcttgtccttaaacacttctgtcaattcggcttacctacaaatcgacaacgtaaggcctgaggacactgccgtctatttctgtgcgcgatcaggcggacccgcggcctggctcgacccctggggccagggaacccaggtcaccgtctcctcag

SEQ ID NO: 2721 - DNA, 349 bp, synthetic construct
  misc_feature 1..349: note = Synthetic construct
  source 1..349: mol_type = other DNA
gaggtccaactggtacagtccggggctgaggtgaagaagcctggggccaccgtgaaaatctcctgcaatgcttctggatacacattcaccgactactacatccactggattcaacaggcccctggaaaacgacctgagtggatggcacgtattgatcccgagaatggtgaaacactttttgcagagagtttccatgacagaatcgccataaccgcggacacgtccacagccaccgccttcatggaattgaggagcctgagatctgaggacacggccgtgtattattgtgcgactcttggtgacgaccataattcctggggccagggaaccctggtcaccgtctcctcag

SEQ ID NO: 2722 - DNA, 367 bp, synthetic construct
  misc_feature 1..367: note = Synthetic construct
  source 1..367: mol_type = other DNA
cagctgcagttggtggagtctgggggaggcgtggtccagcctgggaagtcgctgaggctctcctgtgcaggctctggattcagcttcagtgaatttggcatccactgggtccgccaggctcccggcagggggctggagtgggtggcagttatttcatttggtgggagtgatcaatactacgcagactccgttaagggacgattcactttgtccagagacaactccaagagtacagtgttcctgaagatgaacagtctgagaattgaggacacgggtgtgtattactgtgcgaccgtcagggagcgcctcggagtctccgggtgcccagcctactggggccagggaatatcggtcaccgtctcctccg

SEQ ID NO: 2723 - DNA, 384 bp, synthetic construct
  misc_feature 1..384: note = Synthetic construct
  source 1..384: mol_type = other DNA
gaggtccagctggtacagtccggggctgaggtgaagaagcctggggccaccgtgaaaatctcctgtaaggcttctggatacaccttcaccgactacttcatccactgggtgcaacaggcccctggaaaagggcttgagtggatgggacgcattgatcctgaagatggagaaacaaaatatgcagagaagttccggggcagagtcaccataaccgcagacacatctacaaacacagcctacatggaattgagcagcctgagatttgaggacacggccatttattactgtgcaacagatataaaagtccacggtgactacagagggccctacttctactactacatgggcgtctggggcaaagggaccacggtctccgtctcctca

SEQ ID NO: 2724 - DNA, 370 bp, synthetic construct
  misc_feature 1..370: note = Synthetic construct
  source 1..370: mol_type = other DNA
caggtccagctggtgcagtctggggctgaggtgaagaagcctgggtcctcggtgaaggtctcctgcaaggctcctggaggcaccttcagcagctatggtatccactgggtgcgacaggcccctggacaagggcttgagtggatgggagggatcatcccaagttttggagcagcaaagtacggaaagaacatccccgacagagtcacgattaccgcggacgaatcgtcgagcacagcctatttggagatgagctccctgagatctgaagacacggccatttattactgtgcgagagcgtttgtgtatggttcggggagttgggctgcttttgacatttggggcctggggacaacggtcatcgtctcttcag

SEQ ID NO: 2725 - DNA, 367 bp, synthetic construct
  misc_feature 1..367: note = Synthetic construct
  source 1..367: mol_type = other DNA
caggtgcagctggtgcagtctggggctgaggtgaagaagcctggggcctcagtgaaggtttcctgcaaggcatctggagagacgtccagcaactactatatccactgggtgcgacaggcccctggacaagggcttgagtggatgggagtaatcaaccccactggtagaagcacatcctacgcagggaggttccagggcagagtcaccctgaccagggacacgtctagaaacacagtctacatggaactgagcagcctgacttctgaggacacggccgtatattactgtgcgagagatcgcaaagaattcgaaagacgtcactggttcgacccctggggccagggaaccctggtctccgtctccacag

SEQ ID NO: 2726 - DNA, 376 bp, synthetic construct
  misc_feature 1..376: note = Synthetic construct
  source 1..376: mol_type = other DNA
caggtgcagctggtgcagtctgggactgaggtgaagaagactggggcctcagtgaaaatctcctgcaaggcctctggatacaactttattgactactatatccactgggtgcgacaggcccctggacaggggcttgagtggatgggatggatcaaccctaacagtggtgacacaaactatgcacagaagtttcagggcaggatcaccatggccagggacacgtccatcatcacagcctacatggacctgagcaggctgaaatctgacgacacggccgtctattactgtgcgagggtaggggacgataacgatttttggagtggtcattccagctttgacttctggggccagggaaccctggtcaccgtctcgtcag

SEQ ID NO: 2727 - DNA, 376 bp, synthetic construct
  misc_feature 1..376: note = Synthetic construct
  source 1..376: mol_type = other DNA
caggtgcagctggtgcaatctggggctgaggtgaagaagcctggggcctcagtgaaggtctcctgtaaggcttctggatacaacttcaatgaccacttcatccactgggtgcgacaggcccctggactagggcttgagtggctgggatggatcaaccctaacgatggagacacaaagtattcgcagacctttcagggcagggtcaccatgaccagggacacgtccatcagcacagcctacatggagctgagcaggctgagatctgacgatacggccttctattactgtgcgagagatgaaacggatgtgatggggttcagaatggggtactactttgactcttggggccagggaaccctggtcaccgtctcctcat

SEQ ID NO: 2728 - DNA, 367 bp, synthetic construct
  misc_feature 1..367: note = Synthetic construct
  source 1..367: mol_type = other DNA
caggtccttctggtacaatctggggctgaggtgaagaagcctggggcctcagtgaaggtctcctgcaaggtttccgggtacaccctcactgacttagccatccactgggtgcgacaggctcctggaaaagggcttgagtggatgggaggtttggatcctgacgacggtgaaacactctacgcacagatgttccagggcagagtcaccatgaccgaggactcaactggtgccacagccgacctggagctgagcagcctgacatctgaggacacggccgtctattactgtgcaatcgcaggatcagatagtagctctggattttactttgactactggggccagggtaccctggtcaccgtctcctcag

SEQ ID NO: 2729 - DNA, 364 bp, synthetic construct
  misc_feature 1..364: note = Synthetic construct
  source 1..364: mol_type = other DNA
caggtccaattggtacagcctggggctgaggtgaagaagcctggggcctcagtgaaggtctcctgcaaagtttccggaaaaaccctcactgaattactcatccactgggtgcgacaggctcctggaaaagggcttgagtggatggggggttttgatccagaagatggtgaaacaatctccgcacagaaattccaggccagagtcaccatgaccgcggacggatcttcagacacagcctacatggaactgagtagcctaagatctgaggacacggccgtctattactgtgcaacccagacatatacttcggagagctcccggggtgacttctggggccagggaaccctggtcaccgtctcctcag

SEQ ID NO: 2730 - DNA, 355 bp, synthetic construct
  misc_feature 1..355: note = Synthetic construct
  source 1..355: mol_type = other DNA
caggtgcagctggtgcagtctggggctgaggtgaagaagcctggggcctcagtgaaggtctcctgtacggcctctggacacatcgtcagcagctatgagatccactgggtgcgacaggtcactggacaagggcttgagtggctgggatgcatgaacccaaccagtggtgacacatactttccgcagaagttccagggcagagtctccattaacagggacacctccataaccaccgcctatatggaactgaagagcctgacatctgaagacacggccgtctactactgtgcgggaggccgcgggggatatcacgctgactcctggggccagggaaccctggtcaccgtctcctcag

SEQ ID NO: 2731 - DNA, 373 bp, synthetic construct
  misc_feature 1..373: note = Synthetic construct
  source 1..373: mol_type = other DNA
caggtgcacctggtgcagtctggggctgagttgaagaagcctggggcctcgctgaggatttcctgcaaggcaagtggatacaccttcaccgattactatatccactgggtgcggcaggcccctggacaggggcttgagtggatgggaataatcaaccctactagtgatagcacagacttcccaccgaaatttaagggccgagtctccatgaatagggacacgtccacgaatacagcccacttggacctgaacagcctgagatctgaggacacggccatctattattgtgcgcgaggacagactgtcggacgatactttaactggttaccccttcaacactggggccagggcaccctggtcaccgtctcgtcag

SEQ ID NO: 2732 - DNA, 370 bp, synthetic construct
  misc_feature 1..370: note = Synthetic construct
  source 1..370: mol_type = other DNA
cagtcccttctgacgcagtctggggccgagttgaagaagcctgggtcctctgtgagggtctcctgtcaggcttctggagaccccgtcaacaactatgccatccattgggtgcgacgggcccctggacaaggtcttgagtggatggggtgggtcagccctatttctggaagaggtgaatatgcaccgaagtttcagggcagactcaacattctcgcggaacagtctacgcgaacagtctacatggaactgagtggcctgtcacgtgacgacacggccatttattactgtgcgcgacacaggggacgtgggaattctgccggagtggggttcgacccctggggccaggggacccaggtcaccgtctcctctg

SEQ ID NO: 2733 - DNA, 376 bp, synthetic construct
  misc_feature 1..376: note = Synthetic construct
  source 1..376: mol_type = other DNA
caggtccaacttgtgcagtctgcggctgacgtgaagaagcctggggcctcagtgaaggtttcctgcaaggcttctggatacaccttcacttcctatgctatccattgggtgcgccaggcccccggagaaaggcttgagtggatgggatacatcaacgctgccagtggtgacaccaaatactcacagatgttccagggcagagtcaccattaccaccgatacatccgcgagcacagcctacatggagctgagcagcctgagatatgaagacacggctgtgtattattgtgcgagagatctttcggaagtggtgggagctgctgtttccgatgcttttaatgtctggggccaagggactatggtcaccgtctcttcag

SEQ ID NO: 2734 - DNA, 361 bp, synthetic construct
  misc_feature 1..361: note = Synthetic construct
  source 1..361: mol_type = other DNA
gaggtgcagctggtgcagtctggagcagaggtgaaaaagccgggggagtctctgaagatctcctgtaagggttctggatacagctttaccagctactggatcgcctgggtgcgccagatgcccgggaaaggcctggagtggatggggatcatctatcctggtgactctgataccagatacagcccgtccttccaaggccaggtcaccatctcagccgacaagtccatcagcaccgcctacctgcagtggagcagcctgaaggcctcggacaccgccatgtattactgtgcgagagcagatggctaccgaaagaaaatccttgactactggggccagggatccctggtcaccgtctcctcag

SEQ ID NO: 2735 - DNA, 367 bp, synthetic construct
  misc_feature 1..367: note = Synthetic construct
  source 1..367: mol_type = other DNA
gaggtgcagctggtgcagtctggagcagaggtgaaaaagccgggggagtctctgaagatctcctgtcagggttctggatacagctttaccaactactggatcgcctgggtgcgccagatgcccgggaaaggcctggagtggatggggatcatctatcctaatgattttgataccagatacagcccgtccttccgaggccaggtcaccatctcagccgacaagtccaacaacaccgcccacctgcagtggagcagcctgaaggcctcggacaccgccatttattattgtgcgagacaatcaggaagtagtggttatatctcctattttaaatactggggccagggaaccctggtcaccgtctcctcag

SEQ ID NO: 2736 - DNA, 367 bp, synthetic construct
  misc_feature 1..367: note = Synthetic construct
  source 1..367: mol_type = other DNA
gaggtgcagctggtgcagtctggagcagaggtgaaaaagcccggacagtctctgacaatctcctgtaaggcttctggatattactttagtcaatactggatcgcctgggtgcgccagatgcccgggaaaggcctggagtggatgggggtcatctatcctggtgactctgacaccagatacagcccgtccttccaaggcctggtcaccatctcagccgacaagtccaccacgaccgcctacctgcagtggggcagcctgaaggcctcggacaccgccatgtattattgtgcgagaggtataagtggaattacctacccgtatcactttgactactggggccagggaaccctggtctccgtctcctcag

SEQ ID NO: 2737 - DNA, 385 bp, synthetic construct
  misc_feature 1..385: note = Synthetic construct
  source 1..385: mol_type = other DNA
gaggtgcagctggtgcagtctggagcagaggtgagaaagccgggggagtttctggagatctcctgtaaggattctggcgacaggttaagcagtcactggatcgcctgggtgcgccaggtgtccgggaaaggcctggagtggatgggggtcatcaatcctgaagactctgatattagatatggcccgtccttccaaggccaggtcagcatttcagccgacaagtccaagagcaccgcctacttgcagtggggcagcctgaaggcctcggacagcgccatgtattactgtgcgacattacgtatgatggattattatgatagtagtggtcattatccggactactttgactactggggccagggaaccctggtcaccgtctcctcag

SEQ ID NO: 2738 - DNA, 370 bp, synthetic construct
  misc_feature 1..370: note = Synthetic construct
  source 1..370: mol_type = other DNA
gaggtgcgactggtgcagtctggagcagaggtgaaaaagccgggggaatctctgaagatctcctgtaagggctctggatataattttagtagctactggatcggctgggtacgccagatgcccgggaaaggcccggagtggatggggatcatctttcctgaggactctgataccagatacagcccgtccttccaaggccaggtcctcatctcagccgacaagtccagcagcaccgcctacctacagtggagcagcctgaaggcctcggacaccgccatgttttactgtgcgagacgcaacccttatggctccggccggggttataactttgactcctggggccagggaaccctggtcaccgtctcctcaa

SEQ ID NO: 2739 - DNA, 357 bp, synthetic construct
  misc_feature 1..357: note = Synthetic construct
  source 1..357: mol_type = other DNA
gaggtgcagctggtgcagtctggagcagaggtgaaaaagccgggggagtctctgaagatctcctgtaagggttctggatacagctttaccaaccactggatcggctgggtgcgccaagtgcccgggaaaggcctggagtggatggcgatcatctatcctggtgactctgataccagatacagcccgtccttccaaggccaggtcaccatctcagccgacaagtccatcaataccgcctacctgcaatggagtagcctgaaggcctcggacagcgccatttattactgtgcgagaactacccagtatttcttctacatggacgtctggggcaaagggaccacggtcaccgtctcctca

SEQ ID NO: 2740 - DNA, 397 bp, synthetic construct
  misc_feature 1..397: note = Synthetic construct
  source 1..397: mol_type = other DNA
gaggtgcagctggtgcagtctggagcagaggtgaaaaagccgggggagtctctgaagatctcctgtaagggttctggatacagcttttccagttactggatcggctgggtgcgccagaagcccgggaaaggcctggagtggatggggatcataaatcctgctgactcgggtgtcagatacagtccgtccttgcaaggccaggtcatcatctcagtcgacacctcaataaataccgcctacctacattgggacagcctgaaggcctcggacaccgccatatattactgtgcgcgacccgatagtggtgacgaactcatcaatccgggccggccaagtggttattacacgggggctattgatctgtggggccacgggacagtggtcaccgtctcctcag

SEQ ID NO: 2741 - DNA, 364 bp, synthetic construct
  misc_feature 1..364: note = Synthetic construct
  source 1..364: mol_type = other DNA
gaggcgcagctggtgcagtctggagcagaggtgaaaaagccgggggagtctctgaggatctcctgtaaggcttctggatacctctttggcagctattggatcggctgggtgcgccagaagcccggggagaccctggagttgatgggggtcatctatcctggtgactctgatacaagatacagcccgtccttcgaaggccaggtcaccgtctcagtcgacaagtccatcagcaccgcctacctgcagtggagcagcctgaaggcctcggacagcgccatgtatttctgtgcgagatcagtgaccagtggctggtatggtactctcgactattggggccagggcaccctggtcaccgtctcctcag

SEQ ID NO: 2742 - DNA, 367 bp, synthetic construct
  misc_feature 1..367: note = Synthetic construct
  source 1..367: mol_type = other DNA
gaggtgcagctggtgcagtctggagcagaggtgaaaaagccgggggagtctctgaagatctcctgtaaggcttctggatacaggtttaccagttactggatcggctgggtgcgccagatgcccggaaaaggcctggagtggatgggtatcatgtttcctgatgactctgataccagatacagtccgtccttccaaggccaggtcaccatgtcagccgacaggtccgtcaacaccgcctacctgcagtggagcagcctgaaggcctcggacaccgccatgtattactgtgggagaccgcgtaatagtgggagttattatgatgcttttgatatatggggccaagggacactggtcaccgtctcttcga

SEQ ID NO: 2743 - DNA, 367 bp, synthetic construct
  misc_feature 1..367: note = Synthetic construct
  source 1..367: mol_type = other DNA
gaggtgcagctggtgcagtctggagcagaggtgaaaaagccgggggagtctctgaagatctcctgtcaggtttctggatacagctttaccagctactggatcggctgggtgcgccagatgcccgggaaaggcctggagtggataggaaatatctatcctggtgactctgataccagatacagcccgtccttccaaggccaggtcaccatctcagtcgacacgtccatcaacaccgcctacctgcactggagcagcctgaaggcctcggacaccgccatgtattactgtgcgagacattccttgtctaactttaaacaggcctggttcgacccctggggccagggaacccaggtcatcgtctcctcag

SEQ ID NO: 2744 - DNA, 373 bp, synthetic construct
  misc_feature 1..373: note = Synthetic construct
  source 1..373: mol_type = other DNA
ggggtgcacctggagcagtctggagcagaggtgaaaaagccgggggagtctctgaagatctcctgtaagggttctggatacagctttcccaattactggatcggctgggtgcgccagatgcccgggaaaggcctggagtggatggcaatgatctatcctgatgactctgataccagatacaacccgtccttccaaggccaggtcaccatctcagccgacaagtccatcagcaccgcctacctgcagtggaacaacctgaaggcctcggacaccgccatgtattgctgtgcgagaaatccgggagatgatagtactggtcacccctcttactttaactactggggccagggaaccctggtcaccgtctcctcag

SEQ ID NO: 2745 - DNA, 367 bp, synthetic construct
  misc_feature 1..367: note = Synthetic construct
  source 1..367: mol_type = other DNA
gaagttcaactggaacagtctggagcggaggtgaagaagccgggggagtctctgaagatcgcctgcaagtgttctggatacatttttaccgattactggatcggctgggtgcgccagatgcccgggaaaggcctggagtggatggccatcatttatcctggtgactctcatgtcagatggagtccgtccttccaaggccaggtcaccctctcagtcgacaagtccgtcaacaccgcctacctgcagtggaacaacttgagggcctcggacaccgccatgtatttttgtgcgagacaagagaggcgtatcggcagtggcaaccccttagagttctggggccagggaacccaggtcatcgtctcctcag

SEQ ID NO: 2746 - DNA, 367 bp, synthetic construct
  misc_feature 1..367: note = Synthetic construct
  source 1..367: mol_type = other DNA
gaggtgcagctggtgcagtctggagcagaggtgaaaaagtcgggggagtctctgaagatctcctgtaagggttctggatacagctttagcacatactggatcggctgggtgcgccagatgcccgggaaaggcctggagtggatgggaatcctctatcctggtgactcagatattagatatagtccgtccttcgaaggccaggtcaccatctcagccgacaagtccatcagcaccgcctacctgcagtggagcagcctgaaggcctcggacaccgccatctattactgtgtgagtcccggcgattgtagtggtggtacttgctacccggcctactggggccagggaaccctggtcaccgtctcctcag

SEQ ID NO: 2747 - DNA, 358 bp, synthetic construct
  misc_feature 1..358: note = Synthetic construct
  source 1..358: mol_type = other DNA
gaggtgcagctggtgcagtctggagcagaggtcaaaaagccgggggagtctctgaagatctcctgtaagggttctggatacagctttaccagctactggatcggctgggtgcgccagatgcccgggaaaggcctggagtggatggggaccatctatcctggtgactctgataccatatacagcccgtccttccagggccaggtcaccatctcagccgacaagtccatcagcaccgcctacctgcagtggagcagtctgaaggcctcggacaccgccatgtattattgtgcgagacgatttccgaatagtgaacattttgtctactggggccagggaaccctggtcactgtctcttccg

SEQ ID NO: 2748 - DNA, 300 bp, synthetic construct
  misc_feature 1..300: note = Synthetic construct
  source 1..300: mol_type = other DNA
gggggatacagctttagtagatattggatcggctgggtgcgccagatgcccgggaaaggcctggagtggatggggatcatcaatcctggtgactctgaaactagatacagcccgtccttccaaggtcaggtcaccatctcagccgacaagtccatcagcaccgcctacctgcagtggagtagcctgaaggcctcggacaccgccatttattactgtgcgagacatgtggcaactcgtccctactacttctactactacatggacgtctggggcaaagggaccacggtcaccgtctcctca

SEQ ID NO: 2749 - DNA, 373 bp, synthetic construct
  misc_feature 1..373: note = Synthetic construct
  source 1..373: mol_type = other DNA
gaggagcagctggtgcagtctggagcagaggcgagaaagccgggggagtctctgaagatctcctgtaagggttctggatacagttttaccaattattggatcggctgggtgcgccagatgcccgggaaaggcctggagtggatggggatcatctatcctgatgacgctgatacaacatacagcccggccttccaaggccaggtcaccatctcagccgacaagtccatcagaaccgcctatttgcagtggagcagcctgaaggcctcggacaccgccatgtattactgtgcgcgacgtaatggttaccatgatagtagtgcttatggcggttttgatatctggggccaagggacaatggtcaccgtctcttcag

SEQ ID NO: 2750 - DNA, 370 bp, synthetic construct
  misc_feature 1..370: note = Synthetic construct
  source 1..370: mol_type = other DNA
gaggtgcacctggtgcagtctggagcagaggtgaaaaagccgggggagtctctaaagatctcctgtcagggttctggatacagctttaccaactactggatcggctgggtgcgccagatgcccgggaaaggcctggagtggatggggatcatctatcctggtgattctgataccagatacagcccgtccttccaaggccaggtcaccatctcagccgacaagtccatcagcaccgcctacctgcagtggggcagcctgaaggcctcggacaccgccatgtattactgtgcgagaggggaagatgcctacaatactgagcctgatgcttttgatatctggggccaagggacaagggtcaccgtctcttcag

SEQ ID NO: 2751 - DNA, 358 bp, synthetic construct
  misc_feature 1..358: note = Synthetic construct
  source 1..358: mol_type = other DNA
gaggtgcagctggtgcagtctgaagcagaggtgaaaaagccgggggagtctctgaagatctcctgtaaggcttctggatacacctttaccagcctctggatcggctgggtgcgccagatgcccgggaaaggcctggagtggatggggatcatctatcctggtgactctgataccatatatagcccgtccttccaaggccgggtcactctctcagtcgacaagtccatcagcaccgcctacctacagtggagcagcctggaggcctcggacaccgccatatattactgtgcgaaacatgaagcgcgtgattattactttgactcctggggccagggaaccctggtcaccgtctcctcag

SEQ ID NO: 2752 - DNA, 348 bp, synthetic construct
  misc_feature 1..348: note = Synthetic construct
  source 1..348: mol_type = other DNA
gaggtgcagctggtgcagtctggaccagaggtgaaaaagccgggggagtctctgaagatctcctgtaagggttctggatacagctttaccagctactggatcggctgggtgcgccagatgcccgggaaaggcctggagtggatggggatcatctatcctggtgactctgataccaaatatagcccgtccttccaaggccaggtcaacatctcagccgacaagtccatcagcaccgcctacctgcagtggagcagcctgaaggcctcggacaccgccatgtattactgtgcgagacggaggagcttcgtggacgtctggggcaaagggacaacggtcaccgtctcctca

SEQ ID NO: 2753 - DNA, 387 bp, synthetic construct
  misc_feature 1..387: note = Synthetic construct
  source 1..387: mol_type = other DNA
gaggtgcagctggtgcagtctggagcagaggtgaaaaagccgggggagtctctgaagatctcctgtaagggttctggatacagctttaccagctactggatcggctgggtgcgccagatgcccgggaaaggcctggagtggatggggatcatctatcctggtgactctgataccagatacagcccgtccttccaaggccaggtcaccatctcagccgacaagtccatcagcaccgcctacctgcagtggagcagcctgaaggcctcggacaccgccatgtattactgtgcgagaagtagagttgtagtagtaccagctgctatgaccccctactactactactacatggacgtctggggcaaagggaccacggtcaccgtctcctca

SEQ ID NO: 2754 - DNA, 376 bp, synthetic construct
  misc_feature 1..376: note = Synthetic construct
  source 1..376: mol_type = other DNA
gaggtgcagctggtgcagtctggagcagaggtgaaaaagccgggggagtctctgaagatctcctgtaagggttctggatacagctttaccagctactggatcggctgggtgcgccagatgcccgggaaaggcctggagtggatggggatcatctatcctggtgactctgataccagatacagcccgtccttccaaggccaggtcaccatctcagccgacaagtccatcagcaccgcctacctgcagtggagcagcctgaaggcctcggacaccgccatgtattactgtgcgagacataagggaaggggacgtatagcagtggctggtaaagcttttgatatctggggccaagggacaatggtcaccgtctcttcag

SEQ ID NO: 2755 - DNA, 357 bp, synthetic construct
  misc_feature 1..357: note = Synthetic construct
  source 1..357: mol_type = other DNA
gaggtgcagctggtgcagtctggagcagaggtgaaaaagccgggggagtctctgaagatctcctgtaagggttctggatacagctttaccagctactggatcggctgggtgcgccagatgcccgggaaaggcctggagtggatggggatcatctatcctggtgactctgataccagatacagcccgtccttccaaggccaggtcaccatctcagccgacaagtccatcagcaccgcctacctgcagtggagcagcctgaaggcctcggacaccgccatgtattactgtgcgagacatcggccccactatggcctcatggacgtctggggcaaagggaccacggtcaccgtctcctca

SEQ ID NO: 2756 - DNA, 358 bp, synthetic construct
  misc_feature 1..358: note = Synthetic construct
  source 1..358: mol_type = other DNA
gaggtgcagctggtgcagtctggagcagaggtgaaaaagccgggggagtctctgaagatctcctgtaagggttctggatacagctttaccagctactggatcggctgggtgcgccagatgcccgggaaaggcctggagtggatggggatcatctatcctggtgactctgataccagatacagcccgtccttccaaggccaggtcaccatctcagccgacaagtccatcagcaccgcctacctgcagtggagcagcctgaaggcctcggacaccgccatgtattactgtgcgagacgtcaggctggagagggcccctttgactactggggccagggaaccctggtcaccgtctcctcag

SEQ ID NO: 2757 - DNA, 369 bp, synthetic construct
  misc_feature 1..369: note = Synthetic construct
  source 1..369: mol_type = other DNA
gaggtgcagctggtgcagtctggagcagaggtgaaaaagccgggggagtctctgaagatctcctgtaagggttctggatacagctttaccagctactggatcggctgggtgcgccagatgcccgggaaaggcctggagtggatggggatcatctatcctggtgactctgataccagatacagcccgtccttccaaggccaggtcaccatctcagccgacaagtccatcagcaccgcctacctgcagtggagcagcctgaaggcctcggacaccgccatgtattactgtgcgagactggattgtagtggtggtagctgctacccgcccatggacgtctggggcaaagggaccacggtcaccgtctcctca

SEQ ID NO: 2758 - DNA, 375 bp, synthetic construct
  misc_feature 1..375: note = Synthetic construct
  source 1..375: mol_type = other DNA
gaggtgcagctggtgcagtctggagcagaggtgaaaaagccgggggagtctctgaagatctcctgtaagggttctggatacagctttaccagctactggatcggctgggtgcgccagatgcccgggaaaggcctggagtggatggggatcatctatcctggtgactctgataccagatacagcccgtccttccaaggccaggtcaccatctcagccgacaagtccatcagcaccgcctacctgcagtggagcagcctgaaggcctcggacaccgccatgtattactgtgcgagatccgttcggggagtgggagattactactactactactacatggacgtctggggcaaagggaccacggtcaccgtctcctca

SEQ ID NO: 2759 - DNA, 370 bp, synthetic construct
  misc_feature 1..370: note = Synthetic construct
  source 1..370: mol_type = other DNA
gaggtgcagctggtgcagtctggagcagaggtgaaaaagccgggggagtctctgaagatctcctgtaagggttctggatacagctttaccagctactggatcggctgggtgcgccagatgcccgggaaaggcctggagtggatggggatcatctatcctggtgactctgataccagatacagcccgtccttccaaggccaggtcaccatctcagccgacaagtccatcagcaccgcctacctgcagtggagcagcctgaaggcctcggacaccgccatgtattactgtgcgagcgtcggctactatggttcggggagttctgatgcttttgatatctggggccaagggacaatggtcaccgtctcttcag

SEQ ID NO: 2760 - DNA, 372 bp, synthetic construct
  misc_feature 1..372: note = Synthetic construct
  source 1..372: mol_type = other DNA
gaggtgcagctggtgcagtctggagcagaggtgaaaaagccgggggagtctctgaagatctcctgtaaggtctctggatacagctttagtagatattggatcggctgggtgcgccagatgcccgggaaaggcctggagtggatggggatcatcaatcctggtgactctgaaactagatacagcccgtccttccaaggtcaggtcaccatctcagccgacaagtccatcagcaccgcctacctgcagtggagtagcctgaaggcctcggacaccgccatttattactgtgcgagacatgtggcaactcgtccctactacttctactactacatggacgtctggggcaaagggaccacggtcaccgtctcctca

SEQ ID NO: 2761 - DNA, 391 bp, synthetic construct
  misc_feature 1..391: note = Synthetic construct
  source 1..391: mol_type = other DNA
gaggtgcagttggtgcagtctggggctgaggtgaaaaggccgggggagtctctgaagatctcctgtcagggttctggatatgactttaccgaccactggatcggctgggtgcgccagatgcccgggaaaggcctggagtggatggggatcatctatcctggtgactctgatagtagatacagtccgtccttccaaggccaggtcaccatctcagtcgacaagtccaccagcaccgcctacctgcagtggagcagcctgaaggcctcggacagcgccatgtattactgtgcgagacgagggaaggatgataacagtgcttactacttggggaggacccgaggccgggtatttgactattggggccagggaaccctggtcaccgtctccccag

SEQ ID NO: 2762 - DNA, 355 bp, synthetic construct
  misc_feature 1..355: note = Synthetic construct
  source 1..355: mol_type = other DNA
gaggtgcagctggcgcagtctggggcagaggtgaaaaagccgggggaatctctgaagatctcctgtcaggcttctggatacagttttaccaagtactggatcggctgggtgcgccagatgcccggggaaggcctggagtggatggggatcatctatcctgatgactctgataccagatacagcccgaccttccacggccaggtctccatctcagccgacaggtccatcaataccgtctacttgcagtggagcagtctgaaggcctcggacaccgccatgtattactgtgcgagacagggcggcagctaccgcattgactactggggccagggaaccctggtcaccgtctcctcag

SEQ ID NO: 2763 - DNA, 373 bp, synthetic construct
  misc_feature 1..373: note = Synthetic construct
  source 1..373: mol_type = other DNA
gaggtgcagctggtgcagtctggagcagaggtgaaaaagccgggggagtctctgaagatctcctgtaagggttctggatacagctttaccacctactggatcggttgggtgcgccagatgcccgggaaacgcctggagtggatgggagtcatctatcctggtgactctgacaccagatacagcccgtccttccaaggccaggtcaccatctcagccgacaagtccatcagcaccgcctacctgcagtggaccagcctgaaggcctcggacaccgccatgtattactgtgcgagagtgggggactacggtgactacggtagctactggtacttcgatctctggggccgtggcaccctgatcactgtctcctcag

SEQ ID NO: 2764 - DNA, 361 bp, synthetic construct
  misc_feature 1..361: note = Synthetic construct
  source 1..361: mol_type = other DNA
gaggtgcagctggtgcagtctggagcagaggtgaaaaagccgggggagtctctgaacatttcctgtaagggttctggatacagttttaccagttactggatcgtctgggtgcgccagatgcccggaaaagggctggagtggatgggagtcatctaccctggtgactctgataccagatacagcccgtccttccaaggcgaggtcgccatctcagccgacaactccatcagcaccgcctacctgcaatggagcagcctgaaggcctcggacaccgccatgtactactgtgcccagagtgtaactggagctacagatgcttttgatatttggggccaagggacgatggtcaccgtctcttcag

SEQ ID NO: 2765 - DNA, 364 bp, synthetic construct
  misc_feature 1..364: note = Synthetic construct
  source 1..364: mol_type = other DNA
gaggtgcagctggtgcagtctggagcagaggtgaaaaagccgggggagtctctgaagatctcctgtaagggttctggatatagctttcccaactactggatcgtctgggtgcgccagatgcccgggaaaggcctggagtggatggggatcatctttcctggtgactctgatagcagagtcagcccgtccttccaaggccaggtcaccatctcagccgacaagtccatcagaaccgcctacctgcagtggagcagcctgaaggcctcggacaccgccatgttttactgtgcgagattggggggtcctacggtgactccccgttttgactactggggccagggaaccctggtcaccgtctcctcac

SEQ ID NO: 2766 - DNA, 367 bp, synthetic construct
  misc_feature 1..367: note = Synthetic construct
  source 1..367: mol_type = other DNA
gaggtgcagctggtgcagtctggagcagaagtgaaaaagccgggggagtctctgaagatctcctgcaagggttctggatacgactttagcagccactggatcgtctgggtgcgccagatgtccgggaaaggcctggagtggatgggagtcatctatcctggtgactctgataccagatataacccgtccttccacggccaaggcaccatctcagccgacaggtccagcagcgtcgcctacttggagtggagcagcctgagggcctcggacaccgccatgtacttctgtgcgagactggcgatgaaggaatggagtgtcggtgcttttgatctttggggccaagggacaatggtcaccgtctcttcag

SEQ ID NO: 2767 - DNA, 361 bp, synthetic construct
  misc_feature 1..361: note = Synthetic construct
  source 1..361: mol_type = other DNA
caggtccaacttgtgcagtctggggctgaggtgaagaagcctggggcctcagtaaagatatcctgcaaggcttctggatacagtctcagtgattttggcatctactgggtgcgccgggcccccggacaaaggcttgagtggatgggatggatcaacacctaccaaggcaatacaaaaatttcacagaaattccagggcagagtcaccatcaccagggacaaatccgcgaacacagcccacctggaggtgagaagactgagtcacgaagacacggctctatattactgtgcgagagacatgtggggccaccactacgcgttcgacccctggggccagggaacccaggtcaccgtctcctcag

SEQ ID NO: 2768 - DNA, 370 bp, synthetic construct
  misc_feature 1..370: note = Synthetic construct
  source 1..370: mol_type = other DNA
caggtccagctgctgcagtctggggctgaggtgaagaagcctgggtcctcggtgaaggtgtcctgcaagacctctggaggcaccttcagcaagtatgatatctcgtgggtgcgacaggccccgacacagggtcttgagtggatgggagggatcatccctgtgtttgggacaccaaactacgctgagaagtttaagggcagagtcacaattacgacggacgaatccacgacgacaacctacatggaactaaacagtttgacatctgaagacacggccgtctatttctgtgcccgccggtcgcagcagctcctggtccccggatgggcttttgatatctggggccaagggacaagggtcatcgtctcttcag

SEQ ID NO: 2769 - DNA, 364 bp, synthetic construct
  misc_feature 1..364: note = Synthetic construct
  source 1..364: mol_type = other DNA
gaggtgcagctggtggagtccgggggaggcttggtacagcctggggggtccctgagactctcctgtgcagcctctggattcaccatcggtaattttgaaatgaactgggtccgccaagctccagggaagggcctggagtggatttcatacatcagtaatagtggtgatactatatactacgcagactctgttatgggccgattcaccatctccagagacaacgccaagaattcagtgtttctgcaaatgaacagcctgagagccgcggacacggctgtatattattgtgcgagacttggggattacagtgtctccgatatggggaactactggggccagggaaccccggtcaccgtctcctcag

SEQ ID NO: 2770 - DNA, 364 bp, synthetic construct
  misc_feature 1..364: note = Synthetic construct
  source 1..364: mol_type = other DNA
gaggtgcagttgttggagtctgggggagacttggtacagcctggggggtccctgagactctcctgtgcagcctctggactcacctttagcacctttgccatgaactgggtccgccagactccagggaaggggctggagtgggtctcaggtgttaatgttggtggtggaatcacatactacgcagcctccgtgaagggccggttcaccatttccagagacaattccaagaacaggctatatctacaaatgaacagccttagagccgaggacacggccgtatattactgtacgtttcggggggcctcttgggggagtcttcgttatagctattggggccagggacttctggtcaccgtctcctcag

SEQ ID NO: 2771 - DNA, 382 bp, synthetic construct
  misc_feature 1..382: note = Synthetic construct
  source 1..382: mol_type = other DNA
gaggtgcagctggtggagtctgggggagacatggtacatcctggagggtccgtgagactctcctgtgtaggttctggactcaccttcagcagttctgaaatgaactgggtccgccagactccagggatgggactggagtgggtttcatatattagtggtagtggtagtaccaaatattatgcagactctgtgaggggccgattcaccatctccagagacaacgccaagaattccctggctctgcagatgaacagcctgagagtcgaggacacgggtgtttatttttgtgcgaaagatgtggggtattgtagtagtggcagctgcttccgccccctggcttttcaaatctggggccaagggacaaaggtcaccgtctcttcag

SEQ ID NO: 2772 - DNA, 373 bp, synthetic construct
  misc_feature 1..373: note = Synthetic construct
  source 1..373: mol_type = other DNA
gaggtgcagctggtggagtctgggggaggcttggtaaagcctggggggtcccttaaaatctcctgtgcagcctctggattcactttcagtaacgcctggatgaactgggtccgccaggcgccagggaaggggctggagtgggttggccgtgtgaaaagcaaaactgatggtgggacaacagactacgctgcacccgtgaaaggcagattcaccatctcaagagatgattcagaaaacacgttgtttctgcaaatgaacagcctgaaaaccgacgacacagccgtgtattactgtgccacagatcaatgggggtacggtgacttcgggaactttgactactggggccagggaaccctggtcaccgtctcctcag

SEQ ID NO: 2773 - DNA, 367 bp, synthetic construct
  misc_feature 1..367: note = Synthetic construct
  source 1..367: mol_type = other DNA
gaggcgaacctggtggcgtcggggggagggttggtacagcctggagggtccctgagactctcctgtgcagcctctggattcagctttaaggactatgaaatgaactgggtccgccaggctccagggaagggactggagtgggtctcatacattaataacattggtgacaacatacattatggagactctgtgaagggccgattcaccatctccagagacaacgccaagaactctctctatctgcacatgaacaacctgagagccgaggacacggctgtttatttctgtacgcgggttttgtggttcgagggacgatatgatacttttgatgtttggggccaagggacaatggtcaacgtctcttcag

SEQ ID NO: 2774 - DNA, 381 bp, synthetic construct
  misc_feature 1..381: note = Synthetic construct
  source 1..381: mol_type = other DNA
gaggtgcagctggtggagtctgggggaggcctggtcaagccgggggggtccctgagactctcctgttcagcctctggaatcaccttcagtagttatggcatgaactgggtccgccaggctccagggaagggactggagtgggtctcatccattagtagtagtagtaatttcataaactacgcagactcagtgaagggccgattcaccgtctccagagacaacgccaagaactcactgtatctgcagatgaacagcctgagagccgaggacacggctgtgtattactgtgcgtcccgctattgtcgtgctggcagctgctatcaccattactattactatatggacatctggggcaaagggaccacggtcaccgtctcctca

SEQ ID NO: 2775 - DNA, 364 bp, synthetic construct
  misc_feature 1..364: note = Synthetic construct
  source 1..364: mol_type = other DNA
gaggtgcagctggtggagtctgggggaggcttggtacagcctggggggtccctgagactctcctgtgcagcctctggattcacctttagcgactatgccatgaactgggtccgccaggctccagggaaggggctagagtgggtctcaggtattactagtggtggttacacatactacgcagactccgtgaagggccggttcaccatctccagagacaattccaagaacacgctgtatctgcaagtgaacagcctgagagccgaggacacggccgtatattactgtgcgaaagggggcggttgtagtggtgattgctattttcccctcgactggggccagggaaccctggtcaccgtctcctcag

SEQ ID NO: 2776 - DNA, 370 bp, synthetic construct
  misc_feature 1..370: note = Synthetic construct
  source 1..370: mol_type = other DNA
gaggtgcagctggtggactctgggggaggcttggtacagcctggagggtccctgagactcacctgtgcagcctctggattcaccttcagtagttatgaaatgaactgggtccgccaggctccagggaaggggctggagtggatttcatacattagtagaagtggtagtaccatatactacgcagactctatgaagggccgattcaccatctccagagacaacgccaagaactcactgtatctgcaaatgaagaccctgagagccgaggacacggctgtctattactgtgcgagaggcctggggtattacgatattttgactggtgcttttgactactggggccagggaaccctggtcaccgtctcctcag

SEQ ID NO: 2777 - DNA, 376 bp, synthetic construct
  misc_feature 1..376: note = Synthetic construct
  source 1..376: mol_type = other DNA
gaggtgcagttgttggagtctgggggaggcttggtacagcctggggggtccctgagactctcctgtgcagcctctggattcacctttagcaactatgccatgaactgggtccgccaggctccagggaaggggctggagtgggtctcaattattagtagtgatgctgataacacatactacgcagactccgtgaggggccggttcaccatctccagagacaattccaagaacacgctgtatctggacatgaagagcctgagagacgaggacacggccatatattactgtgcgaaagatagatcagcctccatatatggtgcggggactcccgcccttgactactggggccagggaaccctggtcaccgtctcctcag

SEQ ID NO: 2778 - DNA, 354 bp, synthetic construct
  misc_feature 1..354: note = Synthetic construct
  source 1..354: mol_type = other DNA
gaagtgcagctgttggagtctgggggaggcttggtacagcccggggggtccctgagactctcctgtgcagcctctggattcacctttagcaactatgccatgaactgggtccgccaggctccagggaaggggctggagtgggtctcaggtattagtggtggtggaattacttactacgcagactccgtggagggccggttcaccatctccagagacaattccaagaaaatcctgtatctgcaaattaacagcctgagagtcgaggacacggccgtatattactgtgcgaaagatcgtgacttctactacttcatagacgtctggggcggagggaccacggtcaccgtctcttca

SEQ ID NO: 2779 - DNA, 367 bp, synthetic construct
  misc_feature 1..367: note = Synthetic construct
  source 1..367: mol_type = other DNA
gaggtacagctgttggagtctgggggaggcttggtacagcctggggggtccctgagactctcctgtgcagcctctggattcacttttagcaattatgccatgaactgggtccgccaggctccagggaaggggctggagtgggtctcaggtatgattggtactggtggtaccacatactacgcagactccgcgaagggccggttcaccatctccagagacaattccaagaatacgctgtatctgcaaatgaacagcctgagagccgaggacacggccgtatattactgtgcgaaggcgcgcgtaccagctgctatcagattctactttgactcctggggcctgggaaccctggtcaccgtctcctcag

SEQ ID NO: 2780 - DNA, 355 bp, synthetic construct
  misc_feature 1..355: note = Synthetic construct
  source 1..355: mol_type = other DNA
gaggtgcagctggtggagtctgggggaggcttggtacagcctggagggttcctgagactctcctgtgcagcctctgtattcaatttcagaagttatgaaatgaactgggtccgccaggctccagggaaggggctggagtgggtctcatatattagtagcagtggtagtattgtatcctacgcagactccgtgaagggccgattcaccatctccagagacaacgccaagaactcactttatctggacatgaacagcgtgagagtcgaggacacggctgtttattactgtgcgagagtcactaggttgaactggttcgacccctggggccagggaaccctggtcaccgtctcctcag

SEQ ID NO: 2781 - DNA, 363 bp, synthetic construct
  misc_feature 1..363: note = Synthetic construct
  source 1..363: mol_type = other DNA
gcggtgcagttggtggagtctgggggaagcctggtcaagcctggggggtccctgagactctcctgtgcagcctctggattcaccttcagtacctataacatgaactgggtccgccaggctccagggaaggggctggagtgggtctcatcaatcagtactagtggttcttacttagactacgcagcctcagtgaagggccgcttcaccatctccagagacaacgccaagaacttactgtatcttcaaatgaacagcctgagggacgaggacgcggctgtgtattactgtgcgcgaaatgaaggatacagctattctaactacatggacgtctggggcagagggaccacggtcaccgtctcccca

SEQ ID NO: 2782 - DNA, 382 bp, synthetic construct
  misc_feature 1..382: note = Synthetic construct
  source 1..382: mol_type = other DNA
gaggtgcaactggtggagtctgggggaggcctggtcaagcctggggggtccctgagactctcctgtgcagcctctggattcaccttcagtgactataacatgaactgggtccgccaggctccagggaaggggctggagtgggtctcatccattagtagtagtggtagtcacatttactacgcagactcactgaagggccgactgaccatctccagagacaacgccaagaaaacactgtttctgcaaatgaacagcctgagagccgaagacacggctgtgtattactgtgcgagatccccccccccctattactacgccagtagtggttattacttcgcctttgactactggggccggggaaccgtggtcaccgtctcctcag

SEQ ID NO: 2783 - DNA, 373 bp, synthetic construct
  misc_feature 1..373: note = Synthetic construct
  source 1..373: mol_type = other DNA
gaggtgcaactggtggagtctgggggaggcctggtcaagcctggggggtccctgagactctcctgtgcagtctctggattcaacttcagtagctatagcatgaactgggtccgccaggctccagggaaggggctggagtgggtctcatccattagtagtaccagtcgttacataaactacgcagactcagtgaagggccgagtctccatctccagagacaacgccaagaactcactgtatctgcaaatgaacagcctgacagccgaggacacggctctgtattactgtgcgagagagaagaacttgtatagtggctacgatccgacgggcttaggctactggggccagggaaccctggtcaccgtctcctcag

SEQ ID NO: 2784 - DNA, 361 bp, synthetic construct
  misc_feature 1..361: note = Synthetic construct
  source 1..361: mol_type = other DNA
gaggtgcagctggtggagtctgggggaggcccggtcaagcctggggggtccctgagactctcctgtgcagcctctggattcgccttcagtagctttagcatgaactgggtccgccaggctccagggaaggggctggagtgggtctcatccattagtagtggtagtaattacatagactacgcagagtcagtgaagggccgattcaccatttccagagacaacgccaagaactcactgtatctgcaaatgaatagcctgacagccgaggactcggctgtatatttctgtgcgacctctggttcgggggcttattataaccctgactactggggccagggaaccctcgtcaccgtctcctcag

SEQ ID NO: 2785 - DNA, 379 bp, synthetic construct
  misc_feature 1..379: note = Synthetic construct
  source 1..379: mol_type = other DNA
gaggtgcagctggtggagtctgggggaggcctggtcaagccgggggggtccctgagactctcctgtgcaggctctggattcagcttcagtaactataccatgaactgggtccgccaggctccagggaaggggctggagtgggtctcatccattagtggtagtagtaatgacatatactacgcagactctgtgaagggccgttttaccatctccagagacaacgccaagaactcactgcatctgcaaatgaacagcctgagagccgaggacacgggtatatattactgtgcgacagattccacattttacgatgttttgactactatctgggggtactttgactactggggccagggaaccctggtcaccgtctcctcag

SEQ ID NO: 2786 - DNA, 355 bp, synthetic construct
  misc_feature 1..355: note = Synthetic construct
  source 1..355: mol_type = other DNA
gaggtgcagctggtggagtctgggggaggcctggtcaagcctggggggtccctgagactctcctgtacagcctctggattcaacttcattagtcataccatgaactgggtccgccaggctccagggaaggggctggagtgggtctcatccattaggagtagtagtacttacatatattacgcagactcactgaagggccgaatcaccatctccagagacaacgccaagaactcactgtatctgcaaatgaacagcctgagagtcgaggacacgggtgtctattactgtgcgacagatagtgcctacgagtactttgactcttggggccagggaaccctggtcaccgtctcctcag

SEQ ID NO: 2787 - DNA, 364 bp, synthetic construct
  misc_feature 1..364: note = Synthetic construct
  source 1..364: mol_type = other DNA
gaggtgcagctggtggagtctgggggaggcctggtcaagcctggggggtccctgagactctcctgtgcagcctctggattcatcctcagtagatttagcatgaactgggtccgccaggctccagggaaggggctggagtgggtctcatccataagtggtagtagtagttacagatattacgcagactcagtgaagggccgattcaccgtctccagagacaacgccaagaactctctgtatctgcaaatgaacagcctgcgagccgaggacacggctgtgtattactgcgcgagaagggaggcggcgatgagtaatggtaaccttgactactggggccagggaaccctggtcaccgtctcctcag

SEQ ID NO: 2788 - DNA, 376 bp, synthetic construct
  misc_feature 1..376: note = Synthetic construct
  source 1..376: mol_type = other DNA
gaggtgcagctggtggagtctgggggaggcctggtcaagcctggggggtccctgagactctcctgtgcagcctctggattcaccttcagttactatagcatgaactgggtccgccaggctccagggaaggggctggagtgggtctcatccattagtagtagtagtagttacatatactacgcagactcagtgaagggccgattcaccatctccagagacaacgccaagaactcactgtatctgcaaatgaacagcctgagacccgaggacacggctgtgtattactgtgcgagagaaccatattgtggtggtgattgcccgccgggatattggttcgacccctggggccagggaaccctggtcaccgtctcctcag

SEQ ID NO: 2789 - DNA, 376 bp, synthetic construct
  misc_feature 1..376: note = Synthetic construct
  source 1..376: mol_type = other DNA
gaggtgcagctggtggagtctgggggaggcctggtcaagcctggggggtccctgagactctcctgtgcagcctctggattcaccttcagtagctatagcatgaactgggtccgccaggctccagggaaggggctggagtgggtctcatccattagtagtagtagtagttacatatactacgcagactcagtgaagggccgattcaccatctccagagacaacgccaagaactcactgtatctgcaaatgaacagcctgagagccgaggacacggctgtgtattactgtgcgagagaaggggttaggagcggatacagctatgcctttgatgcttttgatatctggggccaagggacaatggtcaccgtctcttcag

SEQ ID NO: 2790 - DNA, 361 bp, synthetic construct
  misc_feature 1..361: note = Synthetic construct
  source 1..361: mol_type = other DNA
gaggtgcagctggtggagtctgggggaggcctggtcaagcctggggggtccctgagactctcctgtgcagcctctggattcaccttcagtagctatagcatgaactgggtccgccaggctccagggaaggggctggagtgggtctcatccattagtagtagtagtagttacatatactacgcagactcagtgaagggccgattcaccatctccagagacaacgccaagaactcactgtatctgcaaatgaacagcctgagagccgaggacacggctgtgtattactgtgcgagagaatactatggttcggggagttattatacttggtggggccagggaaccctggtcaccgtctcctcag

SEQ ID NO: 2791 - DNA, 370 bp, synthetic construct
  misc_feature 1..370: note = Synthetic construct
  source 1..370: mol_type = other DNA
gaggtgcagctggtggagtctgggggaggcctggtcaagcctggggggtccctgagactctcctgtgcagcctctggattcaccttcagtagctatagcatgaactgggtccgccaggctccagggaaggggctggagtgggtctcatccattagtagtagtagtagttacatatactacgcagactcagtgaagggccgattcaccatctccagagacaacgccaagaactcactgtatctgcaaatgaacagcctgagagccgaggacacggctgtgtattactgtgcgagagatccgaggaggaatcactatgatagtagtggctctgactactggggccagggaaccctggtcaccgtctcctcag

SEQ ID NO: 2792 - DNA, 358 bp, synthetic construct
  misc_feature 1..358: note = Synthetic construct
  source 1..358: mol_type = other DNA
gaggtgcagctggtggagtctgggggaggcctggtcaagcctggggggtccctgagactctcctgtgcagcctctggattcaccttcagtagctatagcatgaactgggtccgccaggctccagggaaggggctggagtgggtctcatccattagtagtagtagtagttacatatactacgcagactcagtgaagggccgattcaccatctccagagacaacgccaagaactcactgtatctgcaaatgaacagcctgagagccgaggacacggctgtgtattactgtgcgagagattttttgggagctagctactttgactactggggccagggaaccctggtcaccgtctcctcag

SEQ ID NO: 2793 - DNA, 379 bp, synthetic construct
  misc_feature 1..379: note = Synthetic construct
  source 1..379: mol_type = other DNA
gaggtgcagctggtggagtctgggggaggcctggtcaagcctggggggtccctgagactctcctgtgcagcctctggattcaccttcagtagctatagcatgaactgggtccgccaggctccagggaaggggctggagtgggtctcatccattagtagtagtagtagttacatatactacgcagactcagtgaagggccgattcaccatctccagagacaacgccaagaactcactgtatctgcaaatgaacagcctgagagccgaggacacggctgtgtattactgtgcgagatccgcccagctctatgatagtagtggttattcggggggcctctttgactactggggccagggaaccctggtcaccgtctcctcag

SEQ ID NO: 2794 - DNA, 369 bp, synthetic construct
  misc_feature 1..369: note = Synthetic construct
  source 1..369: mol_type = other DNA
gaggtgcagctggtggagtctgggggaggcctggtcaagcctggggggtccctgagactctcctgtgcagcctctggattcaccttcagtagctatagcatgaactgggtccgccaggctccagggaaggggctggagtgggtctcatccattagtagtagtagtagttacatatactacgcagactcagtgaagggccgattcaccatctccagagacaacgccaagaactcactgtatctgcaaatgaacagcctgagagccgaggacacggctgtgtattactgtgcgcctttttcgctctacggggggaactactactactacatggacgtctggggcaaagggaccacggtcaccgtctcctca

SEQ ID NO: 2795 - DNA, 358 bp, synthetic construct
  misc_feature 1..358: note = Synthetic construct
  source 1..358: mol_type = other DNA
gaggtccaactggtgcagtcggggggaggcctggtcaagccgggggggtccctgagactctcctgtgcagcctcaggtttcaccttcagcatgtacagtatgaactgggtccgccaggctccagggaaggggctggagtgggtctcattcattagtactagtagtagttacacatattacgcagactcagtgcagggccgattcaccatctccagagacaactccaagaattcactgtatctgcaaatgaacaacctgacagccgaggacacggctgtctattactgtgcgacttcggatcggggaacgactacggtgactccttggggccagggcaccctggtcgtcgtctcctcag

SEQ ID NO: 2796 - DNA, 399 bp, synthetic construct
  misc_feature 1..399: note = Synthetic construct
  source 1..399: mol_type = other DNA
gaattgcagctggtggagtctgggggaggcttggtacagcctggagggtccctgagactctcctgtgcggcctctggattcaccttcagtagttatgaaatgaactgggtccgccaggctccagggaaggggctggagtgggtttcatacattagcattattggtagtaccatatactacgcagactctgtgaagggccgattcaccatctccagagacaacgccaagagctcactgtatctgcaaatgaataacctgagagccgaggacacggctgtttattactgtgcgagattttcggccggaaggcctcaatattgtagtggtggtacctgctaccctccggacttctattacatggacgtctggggcaaagggatcacggtcaccgtctcctca

SEQ ID NO: 2797 - DNA, 373 bp, synthetic construct
  misc_feature 1..373: note = Synthetic construct
  source 1..373: mol_type = other DNA
gacgtgcagctggtggagtctgggggaggcttggtacagcctggagggtccctgagactctcctgtgcagcctctggattcaccttcagtagttatgaaatgaactgggtccgccaggctccagggaaggggctggagtgggtttcatacattagtagtagtggtagtaccatgtactacgcagactctgtgaagggccgattcaccatctccagagacaacgccaagaactcactatatctgcaaatgaacagcctgagagccgaggacacggctgtttattactgtgcgagagatcgaggtagcagcagctggtacgggggcgatgcttttgatttctggggccaaggaacaatggtcaccgtctcttcag

SEQ ID NO: 2798 - DNA, 346 bp, synthetic construct
  misc_feature 1..346: note = Synthetic construct
  source 1..346: mol_type = other DNA
gacgtgcagctggtggagtctgggggaggcttggtacagcctggagggtccctgagactctcctgtgcagcctctggattcatcttcagtgattatgaaatgaactgggtccgccaggctccagggaaggggctggagtgggtttcatacattgatagtggtggtactaccatatactacgcagactctgtggagggccgattcatcgtctccagagacaacgccgagaactcactatatctgcaaatgaacagcctgacagtcgaggacacggctgtttattactgtgcgagagggggactacggcgaaactggggccagggaaccctggtcaccgtctcctcag

SEQ ID NO: 2799 - DNA, 355 bp, synthetic construct
  misc_feature 1..355: note = Synthetic construct
  source 1..355: mol_type = other DNA
gaggaacaattgatggagtctgggggaggcttggtacagcctggagggtccctgagactctcctgtgtagcctctggattcctcttcagaacttatgaaatgaactgggtccgccaggctccagggaaggggctggagtgggtttcatacattagtagtagtggtggaaccatatactacgcagactctgtgaagggccgattcaccatctccagagacaacgccaagaactcactgtatctgcaattgaacagcctgagagccgaggacacggctgtctattactgtgcgagagatgaccgctacggtgaccttgatttttggggcctgggaaccctggtcaccgtctcctcag

SEQ ID NO: 2800 - DNA, 390 bp, synthetic construct
  misc_feature 1..390: note = Synthetic construct
  source 1..390: mol_type = other DNA
gaggtgcagctggcggagtctgggggaggcttggtacagcctggagggtccctgagactctcctgtgcagcctctggattcaccttcagtagttatgaaatgaactgggtccgccaggctccagggaaggggctggagtgggtttcatacattagtagtactggtagtaccatatactacgcagactctgtgaagggccgattcaccatctccagagacaacgccaagaactcactgtatctgcaaatgaacagcctgagagccgaggacacggctgtttattattgtgcgagagggcccaattactatgatagtagaaatcattactcgccaccactcgaccagtacatggacgtctggggcaaagggaccacggtcaccgtctcctca

SEQ ID NO: 2801 - DNA, 352 bp, synthetic construct
  misc_feature 1..352: note = Synthetic construct
  source 1..352: mol_type = other DNA
gaggtgcagctggtggagtctgggggaggcctggtacagcctggagggtccctgagactctcctgtgcagcctctggattcaccttcagtagtaatgaaatgaactgggtccgccaggctccagggaaggggctggagtgggtttcatacattagtagtggtggttataccatatactacgcaggctctgtgaagggccgattcaccatctccagagacaacgccaagaactccctgtatctgcaaatgaacagcctgagagccgaggacacggctgtttattactgtgcgagcgggaacggtgacttcgtgtacttctggggccagggaaccctggtcaccgtctcctcag

SEQ ID NO: 2802 - DNA, 378 bp, synthetic construct
  misc_feature 1..378: note = Synthetic construct
  source 1..378: mol_type = other DNA
gaggtgcagctggtggagtctgggggaggcttggtacagcctggagggtccctgagactctcctgcgcaacgtctggattcagtttcaggagatatgacatgaactgggtccgccaggctccagggaaggggctggagtgggtttcatacattagtagtagtgctaatgacatttactactcagactctgtgaagggccgattcaccgtctccagagacaacgccaaaaactcactatatctgcaattgaacagcctgagacccgaagacacggctgtttattattgtgcgagagaggacagagctgtggctggtccctggtcctcctactacttcatggacgtctggggcaaagggaccacggtcaccgtctcttca

SEQ ID NO: 2803 - DNA, 343 bp, synthetic construct
  misc_feature 1..343: note = Synthetic construct
  source 1..343: mol_type = other DNA
gaggtgcagctggtggagtctgggggaggcttggtacagcctggagggtccctgagactctcctgtgcagcctctggattcaccttcagtagttatgaaatgaactgggtccgccaggctccagggaaggggctggagtgggtttcatacattagtagtagtggtagtaccatatactacgcagactctgtgaagggccgattcaccatctccagagacaacgccaagaactcactgtatctgcaaatgaacagcctgagagccgaggacacggctgtttattactgtgcgagagacgagaacgactactggggccagggaaccctggtcaccgtctcctcag

SEQ ID NO: 2804 - DNA, 358 bp, synthetic construct
  misc_feature 1..358: note = Synthetic construct
  source 1..358: mol_type = other DNA
gaggtgcagctggtggagtctgggggaggcttggtacagcctggagggtccctgagactctcctgtgcagcctctggattcaccttcagtagttatgaaatgaactgggtccgccaggctccagggaaggggctggagtgggtttcatacattagtagtagtggtagtaccatatactacgcagactctgtgaagggccgattcaccatctccagagacaacgccaagaactcactgtatctgcaaatgaacagcctgagagccgaggacacggctgtttattactgtgcgagagatacaggatatacccggaaacttgactactggggccagggaaccctggtcaccgtctcctcag

SEQ ID NO: 2805 - DNA, 384 bp, synthetic construct
  misc_feature 1..384: note = Synthetic construct
  source 1..384: mol_type = other DNA
gaggtgcagctggtggagtctgggggaggcttggtacagcctggagggtccctgagactctcctgtgcagcctctggattcaccttcagtagttatgaaatgaactgggtccgccaggctccagggaaggggctggagtgggtttcatacattagtagtagtggtagtaccatatactacgcagactctgtgaagggccgattcaccatctccagagacaacgccaagaactcactgtatctgcaaatgaacagcctgagagccgaggacacggctgtttattactgtgcgagagatcactacggtggtaaatccggaagcggatactactactactactacatggacgtctggggcaaagggaccacggtcaccgtctcctca

SEQ ID NO: 2806 - DNA, 342 bp, synthetic construct
  misc_feature 1..342: note = Synthetic construct
  source 1..342: mol_type = other DNA
gaggtgcagctggtggagtctgggggaggcttggtacagcctggagggtccctgagactctcctgtgcagcctctggattcaccttcagtagttatgaaatgaactgggtccgccaggctccagggaaggggctggagtgggtttcatacattagtagtagtggtagtaccatatactacgcagactctgtgaagggccgattcaccatctccagagacaacgccaagaactcactgtatctgcaaatgaacagcctgagagccgaggacacggctgtttattactgtgcgagagctttcctggacgtctggggcaaagggaccacggtcaccgtctcctca

SEQ ID NO: 2807 - DNA, 378 bp, synthetic construct
  misc_feature 1..378: note = Synthetic construct
  source 1..378: mol_type = other DNA
gaggtgcagctggtggagtctgggggaggcttggtacagcctggagggtccctgagactctcctgtgcagcctctggattcaccttcagtagttatgaaatgaactgggtccgccaggctccagggaaggggctggagtgggtttcatacattagtagtagtggtagtaccatatactacgcagactctgtgaagggccgattcaccatctccagagacaacgccaagaactcactgtatctgcaaatgaacagcctgagagccgaggacacggctgtttattactgtgcgagagggggcgactacgggggaacctgggcgtactactactactacatggacgtctggggcaaagggaccacggtcaccgtctcctca

SEQ ID NO: 2808 - DNA, 382 bp, synthetic construct
  misc_feature 1..382: note = Synthetic construct
  source 1..382: mol_type = other DNA
gaggtgcagctggtggagtctgggggaggcttggtacagcctggagggtccctgagactctcctgtgcagcctctggattcaccttcagtagttatgaaatgaactgggtccgccaggctccagggaaggggctggagtgggtttcatacattagtagtagtggtagtaccatatactacgcagactctgtgaagggccgattcaccatctccagagacaacgccaagaactcactgtatctgcaaatgaacagcctgagagccgaggacacggctgtttattactgtgcgagaggtccttattactatgatagtagtagttattacccaaaagaatacttccagcactggggccagggcaccctggtcaccgtctcctcag

SEQ ID NO: 2809 - DNA, 381 bp, synthetic construct
  misc_feature 1..381: note = Synthetic construct
  source 1..381: mol_type = other DNA
gaggtgcagctggtggagtctgggggaggcttggtacagcctggagggtccctgagactctcctgtgcagcctctggattcaccttcagtagttatgaaatgaactgggtccgccaggctccagggaaggggctggagtgggtttcatacattagtagtagtggtagtaccatatactacgcagactctgtgaagggccgattcaccatctccagagacaacgccaagaactcactgtatctgcaaatgaacagcctgagagccgaggacacggctgtttattactgtgcgagagttggtgatgatagtagtggttggggttactactactactactacatggacgtctggggcaaagggaccacggtcaccgtctcctca

SEQ ID NO: 2810 - DNA, 364 bp, synthetic construct
  misc_feature 1..364: note = Synthetic construct
  source 1..364: mol_type = other DNA
gaggtgcagctggtggagtctgggggaggcttggtacagcctggagggtccctgagactctcctgtgcagcctctggattcaccttcagtagttatgaaatgaactgggtccgccaggctccagggaaggggctggagtgggtttcatacattagtagtagtggtagtaccatatactacgcagactctgtgaagggccgattcaccatctccagagacaacgccaagaactcactgtatctgcaaatgaacagcctgagagccgaggacacggctgtttattactgtgcgagggagaattactatggttcggggagttatttgggctactggggccagggaaccctggtcaccgtctcctcag

SEQ ID NO: 2811 - DNA, 349 bp, synthetic construct
  misc_feature 1..349: note = Synthetic construct
  source 1..349: mol_type = other DNA
gaggtgcagctggtggagtctgggggaggcttggtacagcctggagggtccctgagactctcctgtgcagcctctggattcaccttcagtagttatgaaatgaactgggtccgccaggctccagggaaggggctggagtgggtttcatacattagtagtagtggaagtaccatatactacgcagagtctgtgaagggccgattcaccatctccagagacaacgccaagaactcactgtatctgcaaatgaacagcctgagagccgaggacacggctgtttattactgtgcgaggggttatggttcgggggactactggggccagggaaccctggtcaccgtctcctcag

SEQ ID NO: 2812 - DNA, 376 bp, synthetic construct
  misc_feature 1..376: note = Synthetic construct
  source 1..376: mol_type = other DNA
gacgtgcaattggtggaatctgggggaggcctggtcaagccgggggggtccctgagactctcctgtgttgcctctggattcaacttcagtcattattccatgaactgggtccgccaggctccagggaggggcctggagtgggtcgcaaccatcagcagtattagcaattacatttattatgtagattcagtgaagggccgattcaccatctccagagacaacgccaagaactcactgtatctgcaaatgaatagcctgcgagccgaggacacggcagtatattactgtgcgagagttgggagtctttttgaactaaatggccgggagtcgggtctcgacccctggggccagggaactctggtcaccgtctcctcag

SEQ ID NO: 2813 - DNA, 356 bp, synthetic construct
  misc_feature 1..356: note = Synthetic construct
  source 1..356: mol_type = other DNA
ggggtctgggggagccttggtacagcctggagggtccctgcgactctcctgtttaggatctggattcaccttcagtagttttgaaatgaactgggtccgccaggctccagggagggggctggagtgggtctcacatatcagtagtggggggagtaccacaaactacgcagactctgtgaagggccgattcaccgtctccagagacaacgccaagaactcattgcatctgcaaatgaatagcctgagagccgaggacacggcggtttattattgtacgagagttttcggattttcggcttggaacttcggtgacttttactactggggccagggaacccgcgtcaccgtctcctcag

SEQ ID NO: 2814 - DNA, 382 bp, synthetic construct
  misc_feature 1..382: note = Synthetic construct
  source 1..382: mol_type = other DNA
gaggtgcagctggaggagtctgggggaggcttggtacagcctggagggtcccggagactctcctgtgcagcctctggattcaccttcagtagttatgaaatgaactgggtccgccaggctccagggatggggctggagtgggtttcatacattagtagtagtggtagtaccatttactacgcagactctgtgaagggccgattcaccatctccagagacaacgccaagaactcactgtatctgcaaatgaacagcctgagagccgaggacacggctgtttattactgtgcgagagatcccctttattactatgatagtggtggttattaccatgatgcttttgatatctggggccaagggacaatggtcaccgtctcttcag

SEQ ID NO: 2815 - DNA, 361 bp, synthetic construct
  misc_feature 1..361: note = Synthetic construct
  source 1..361: mol_type = other DNA
gaggtgcagctggtggagtctgggggaggcttggtacagcctggagggtccctgagactctcctgtgccgcctctggattcaccttcagtagttatgagatgaactgggtccgccaggctccaggggaggggctggagtggattgcatacattagtagtactagttttcccatctattacgcagactctgtgaagggccgattcaccatctccagagacaacgccaagaattcagtttttctacagatggacaacctgagagccgaggacacggctgtctattactgtgcgagtcgccccgaatatacgtttggttactttgactcctggggccagggaaccctggtcaccgtctcctcag

SEQ ID NO: 2816 - DNA, 358 bp, synthetic construct
  misc_feature 1..358: note = Synthetic construct
  source 1..358: mol_type = other DNA
gaggtgcagctggtggagtctggggggggcttggtaaagcctggagggtccctgagactctcctgtacaggctctggattcaccttcagtgattatgaaatgaactgggtccgccaggctccgggggaggggctggagtgggtttcattcattggaagtagtagtagtgtcatacactacgcagactctgtgaagggccgattcaccatctccagagacaacgccaagaacgcactgtatctacaaatggagagcctgagagccgacgacacggctgtttatttctgtgcgagagacatagactggaactacggacttgactcctggggccagggaaccctggtcaccgtctcctcag

SEQ ID NO: 2817 - DNA, 373 bp, synthetic construct
  misc_feature 1..373: note = Synthetic construct
  source 1..373: mol_type = other DNA
gaggtgcagttggtggagtctgggggaggcttggtacagcctggagggtccctgagactctcctgcacagcccctgagttcaccttcagtaattatgaaatgaactgggtccgccaggctgcagggaaggggctggagtgggtttcatatattagtgatagtgggaggaccatatactacgcagactctgtgaagggccggtttatcatttccagagacaaagccaagaattcactgtatctgcaaatgaatagcctgagggtcgaggacacggctgtttattactgtgcgaaagtgggcaaccgggtcccgacgaggaggggtggggcttttgatatttggggccaagggacaatggtcaccgtctccttag

SEQ ID NO: 2818 - DNA, 382 bp, synthetic construct
  misc_feature 1..382: note = Synthetic construct
  source 1..382: mol_type = other DNA
gaggtgcagctggtggagtccgggggcggcctggtcaagcctggggggtccctgagactctcctgtgtagcctctggattcaccttcagtagttataccatgaactgggtccgccaggttccagggaaggggctggagtgggtctcatccattagtagcagtgatagttacatatcctacgcagactcagtgaagggccgattcaccatctccagagacaacgccaagaactcactatatctccaattgaacagcctgagagtcgaggacacggctctatattactgtgcgagagatcgggcacactgtactaatagcagctgcttttcggggggctggttcgactcctggggccagggaaccctggtcaccgtctcctcag

SEQ ID NO: 2819 - DNA, 382 bp, synthetic construct
  misc_feature 1..382: note = Synthetic construct
  source 1..382: mol_type = other DNA
gaggtgcaactggtggagtctgggggcggcctggtcaagcctggggggtccctgagactctcctgtgcaggctctggattcagcttcagtgcctatagcatgaactgggtccgccggactccagagaagggcctggagtgggtcgcatccattagttttcgtagtcatttcatatacatcgcagactcagtgaagggccgattcaccgtctccagagacaacgccaagagcactctgtttctgcagatgaacgacctgagagccgacgacacggcatattattactgtgcgagaggttgggtggggcaggaccccactgcttaccgcacagggggctactttgactcctggggccggggaaccctggtcaccgtctcctcag

SEQ ID NO: 2820 - DNA, 382 bp, synthetic construct
  misc_feature 1..382: note = Synthetic construct
  source 1..382: mol_type = other DNA
gaggtgcaactggtggagtctgggggaggcctggtcaagcctggggggtccctgagactctcctgtgcagcctctggcttctccttcggtgcttatggcatgaactgggtccgctgggctccagggaaggggctggagtgggtcgcatccattaatagttatagcagtcacatatattatgtagactcagtgaagggccgattcaccatctccagagacaacgccaagagctcattgtatctgcaaatgaccagcctgagcgccgaggacacggctgtttattactgtgcgagagatttggacggttactatggttcgggaagttattatcccgatgcttttgatatctggggccaggggacaaaggtcaccgtctcttcag

SEQ ID NO: 2821 - DNA, 366 bp, synthetic construct
  misc_feature 1..366: note = Synthetic construct
  source 1..366: mol_type = other DNA
caggtccagctggtgcagtctggggctgaggtgaagaagcctgggtcctcggtgaaggtctcctgcaaggcttctggaggcaccttcagcagttatgctatgaactgggtgcgacaggcccctggacaagggcttgagtggatgggatggatcatccctatctttggaacagcaaactacgcacagaagttccagggcagagtcacgattaccgcggacgagtccacgagcacagcctacatggagctgagcagcctgagatctgaggacacggccgtgtattactgtgcgagagtggtcggcagcagctcctactactaccacattgacgtctggggcaaagggaccacggtcaccgtctcctca

SEQ ID NO: 2822 - DNA, 360 bp, synthetic construct
  misc_feature 1..360: note = Synthetic construct
  source 1..360: mol_type = other DNA
caggtccacctggtggagtctgggggaggcttggtcaagcctggagggtccctgagactctcctgtgcagcctctggattcagctttagtgactactacatgaagtggatccgccaggctccagggaaggggctggagtgggtttcatacattagtggcagtggggataccatctactacgcagactctgtgaagggccgattcaccatctccagggacaacgccaagaactcactgtttctgcaaatggacagcctgagagccgaggactcggctgtgtattactgtgcgagagggggagaatcttactactggtacatggacgtctggggcaaagggaccacggtcaccgtctcctca

SEQ ID NO: 2823 - DNA, 369 bp, synthetic construct
  misc_feature 1..369: note = Synthetic construct
  source 1..369: mol_type = other DNA
gaggtgcagctggtggagtctgggggaggcttggtcaagcctggagggtccctgagactctcttgtgcagtttctggattcaccttcagtgactattctatgaattggattcgccaggctccagggaaggggctggagtggctttcatatattagtcctactggtagtaccggaaatgtcgcaggctctgtgaggggccgattcaccatgtccagggacaacgccaagaattccctgtatctgcaaatggacagcctgacagtcgaggacacggctgtctactactgtgcaagagaagcccgctatggttcggggagcccttggtacatggacgtctggggcaaagggactacggtcaccgtctcctca

SEQ ID NO: 2824 - DNA, 367 bp, synthetic construct
  misc_feature 1..367: note = Synthetic construct
  source 1..367: mol_type = other DNA
gaggtgcagctggtggagtctgggggaggcctggtcaagcctggggggtccctgagactctcctgtgcagcctctggattcaccttcagcagcaatagcatgaattgggtccgccagactccagggaaggggctggagtgggtctcgtccattactagtgatgggaattacatatcttacgcagactcagtgaagggccgattcaccatctccagagacaacgccaagaactcactgtttctgcaaatgaacagcctgagagccgacgacacggctgtttattactgtgcgagagccatagagatgtctactacggatggtgctttagatctctggggccaagggacaatggtcaccgtctcttcag

SEQ ID NO: 2825 - DNA, 360 bp, synthetic construct
  misc_feature 1..360: note = Synthetic construct
  source 1..360: mol_type = other DNA
gaggtgcgattggaggagtctgggggaggccacattgagccgggggggtccctgagactctcgtgttcagcctctggattcaccttcagtgcattctacatgaattgggtccgccaggctccagggaagggactggagtgggtcgcttccatcagtggcagtggaacgacgatatattcctcagactcagtgaagggccgattcaccatttccagggacaatgccaagagattattgtctttagaaatggaaggtctgagggacgacgactcgggtgtctattactgtgtgcgtgctgacgactcttatcactactacatgttggactggggcaaagggaccacggtcaccgtctcctct

SEQ ID NO: 2826 - DNA, 385 bp, synthetic construct
  misc_feature 1..385: note = Synthetic construct
  source 1..385: mol_type = other DNA
gacgtgcaactggtggagtctgggggaggcttggtacagcctggagggtccctgagactctcctgtgcagtctctggattcatcttcagatcttatgcaatgaattgggtccgccaggctccagggaaggggctggaatgggtctcatacattagtcgtactgggactatcatatatgatgcagattctgtgaagggccgattcaccatctccagagacaacgccaagaattcactgtatctgcaaatgaacagcctgagagccgaggacacggctatttattactgtgtgagagataattactttgatagtagtggttattacctttacggaccccactactttgactactggggccaaggaaccctggtcaccgtctcctcag

SEQ ID NO: 2827 - DNA, 382 bp, synthetic construct
  misc_feature 1..382: note = Synthetic construct
  source 1..382: mol_type = other DNA
gaggtgcaactggtggagtctgggggaggcttggtgcagcctggcgggtccctgagactctcctgtacagcctctggattcattttcaatacttatgaaatgaattgggtccgccaggctccagggaggggactggagtggatttcatacattggttctagtggaagtaccatatactacgcagactctgtgaagggccgattcaccatctccagagacaacgccaacaactcactgtatctgcaaatgaacagcctgagagccgaggacacggctgtttattattgtgcgaggttccacagggaaacatactgtggtggtgattgctattcggggacttttgatgtctggggccgagggacaatggtcaccgtctcttcag

SEQ ID NO: 2828 - DNA, 387 bp, synthetic construct
  misc_feature 1..387: note = Synthetic construct
  source 1..387: mol_type = other DNA
gaggtgcagttggtggagtctgggggagccttggtccagcctggagagtccctcagactctcttgtgaagcctctggattcaccttcaaaagttttgagatgaattgggtccgccaggctccagggagggggctgcagtggcttgcattcattagtggtaatggtgacaccatctactacgcggactctgtgaagggccgattcaccatatccagagacaacgccaagaattcagtgtttctagaagtgagcagcctgagagccgaagacacggctctgtactactgtgtgaggggggccccacattcgcagtataccagtttttggttctatagttactacttcatggacgtctggggcaacgggaccacgatcactgtctcctca

SEQ ID NO: 2829 - DNA, 361 bp, synthetic construct
  misc_feature 1..361: note = Synthetic construct
  source 1..361: mol_type = other DNA
gaggtgcagctggtggagtctgggggaggcttggtgaagcctggggggtcccttagactctcctgtgcagcctctggattcaatttcactaacgcctggatgaattgggtccgccaggctccagggcaggggctggactgggtcggccgtattaaaagcgaaactgatggtgggacaacagaccacgctgcacccgtgaaaggcagattcaccatctcaagagatgattcaaaaaacaccctgtttctgcaaatggacagcctgaaaaccgaggacacagccatttattactgtaccacagtacataccattaggggctttgactactggggccagggaaccctggtcaccgtctcctcag

SEQ ID NO: 2830 - DNA, 364 bp, synthetic construct
  misc_feature 1..364: note = Synthetic construct
  source 1..364: mol_type = other DNA
gcggttcaactggtggaatctgggggaggcctggttcagcctggagggtccctgagactctcctgtgcagcctctggattcaacttcagtagttatgaaatgaattgggtccgccagtctccagggaaggggctggagtgggtttcatacatcagtagttctgggagtatgatatactatgcagactctgtgaagggccgattcaccatctccagagacaacgccaagaagtccgtgaccctgcaaatgaatagtctgaaagtggaggatacggctctttacttctgtgtgcgagcttggcagcaactggtatggggaggtcttgatatctggggccaagggacactggtcaccgtcgcctcag

SEQ ID NO: 2831 - DNA, 378 bp, synthetic construct
  misc_feature 1..378: note = Synthetic construct
  source 1..378: mol_type = other DNA
gaggtgcagctggtggagtctgggggaggcctggtcaagcctggggggtccctgagagtctcctgtgcagcctctggattcacctttagtagttatagtatgaattgggtccgtcaggctccagggaaggggctagagtgggtcgcatccataactcgccgtgggacttacatctactacctagactcagtgaagggccgattcaccatttccagagacaacgcccagaactcactgcatctgcaaatggacagcctgagagccgaggacacggctgtctattactgtgcgagagatctccgagatgagagtgttgacgagtactactattactacatggacgtctggggcaaagggaccacggtcaccgtctcctca

SEQ ID NO: 2832 - DNA, 375 bp, synthetic construct
  misc_feature 1..375: note = Synthetic construct
  source 1..375: mol_type = other DNA
caggtgcagctggtgcaatctgggtctgagttgaagaagcctggggcctcagtgaaggtttcctgcaaggcttctggatacaccttcactagctatgctatgaattgggtgcgacaggcccctggacaagggcttgagtggatgggatggatcaacaccaacactgggaacccaacgtatgcccagggcttcacaggacggtttgtcttctccttggacacctctgtcagcacggcatatctgcagatcagcagcctaaaggctgaggacactgccgtgtattactgtgcgagagaagggatggctacaaggggttactactactactactacatggacgtctggggcaaagggaccacggtcaccgtctcctca

SEQ ID NO: 2833 - DNA, 355 bp, synthetic construct
  misc_feature 1..355: note = Synthetic construct
  source 1..355: mol_type = other DNA
caggtgcagctggtgcaatctgggtctgagttgaagaagcctggggcctcagtgaaggtttcctgcaaggcttctggatacaccttcactagctatgctatgaattgggtgcgacaggcccctggacaagggcttgagtggatgggatggatcaacaccaacactgggaacccaacgtatgcccagggcttcacaggacggtttgtcttctccttggacacctctgtcagcacggcatatctgcagatcagcagcctaaaggctgaggacactgccgtgtattactgtgcgagagacctcgtagtaggtgcttttgatatctggggccaagggacaatggtcaccgtctcttcag

SEQ ID NO: 2834 - DNA, 393 bp, synthetic construct
  misc_feature 1..393: note = Synthetic construct
  source 1..393: mol_type = other DNA
caggtgcagctggtgcaatctgggtctgagttgaagaagcctggggcctcagtgaaggtttcctgcaaggcttctggatacaccttcactagctatgctatgaattgggtgcgacaggcccctggacaagggcttgagtggatgggatggatcaacaccaacactgggaacccaacgtatgcccagggcttcacaggacggtttgtcttctccttggacacctctgtcagcacggcatatctgcagatcagcagcctaaaggctgaggacactgccgtgtattactgtgcgagaggccatgatagtagtggttattacttttttttgggggtgggctactactactactacatggacgtctggggcaaagggaccacggtcaccgtctcctca

SEQ ID NO: 2835 - DNA, 379 bp, synthetic construct
  misc_feature 1..379: note = Synthetic construct
  source 1..379: mol_type = other DNA
caggtgcagctggtgcaatctgggtctgagttgaagaagcctggggcctcagtgaaggtttcctgcaaggcttctggatacaccttcactagctatgctatgaattgggtgcgacaggcccctggacaagggcttgagtggatgggatggatcaacaccaacactgggaacccaacgtatgcccagggcttcacaggacggtttgtcttctccttggacacctctgtcagcacggcatatctgcagatcagcagcctaaaggctgaggacactgccgtgtattactgtgcgagaggtcttatagcagatagtagtggttattacaagttacggctatttgactactggggccagggaaccctggtcaccgtctcctcag

SEQ ID NO: 2836 - DNA, 361 bp, synthetic construct
  misc_feature 1..361: note = Synthetic construct
  source 1..361: mol_type = other DNA
caggtgcagctggtgcaatctgggtctgagttgaagaagcctggggcctcagtgaaggtttcctgcaaggcttctggatccaccttcactacctatgctatgaattgggtgcgacaggcccctggacaagggcttgagtggatgggatggatcaacaccaacactgggaacccaacgtatgcccagggcttcacaggacgatttgtcttctccttggacacctctggcagcacggcatatctgcagatcagcagcctaaaggctgaggacactgccatatattactgtgcgagatcaccaacgggttatccctactactttgactactggggccagggaaccctggtcaccgtctcctcag

SEQ ID NO: 2837 - DNA, 361 bp, synthetic construct
  misc_feature 1..361: note = Synthetic construct
  source 1..361: mol_type = other DNA
caggtgcagctggtgcaatctgggtctgagttgaagaagcctggggcctcagtgaaggtttcctgcaaggcttctggatacagcttcaatatctatgctatgaattgggtgcgacaggtccctggacaagggcttgagtggatgggatggatcaacaccaaaactgggaacccgacgtacgcccagggcttcactggacggtttgtcttctccttggacagctctgtcagtacggcatatctgcagatcaccagcctaaaggctgaggacactgccatgtattactgtgcgagagatcctgactatgatactagtggtccagactactggggccagggaaccctggtcactgtctcgtcag

SEQ ID NO: 2838 - DNA, 361 bp, synthetic construct
  misc_feature 1..361: note = Synthetic construct
  source 1..361: mol_type = other DNA
caggtgcggttggagcagtctggatctgagttgaagaagcctgggacctcagtgaaggtttcctgcaaggcttctggatacagcttcatcacatatgctatgaattgggtgcgacaggtccctggacaagggcttgagtggatgggatggatcaacaccaacactgggaggccaatgtatgcccagggcttcacaggacggtttgtcttctccttggacacgtctgtcaacacggcatatttggagatcactagcctgaagactgaggacagtgccgtttattactgtgcgagagatgatggaggggggtactggggcttagacctctggggccaggggaccctggtcaccgtcccctcag

SEQ ID NO: 2839 - DNA, 397 bp, synthetic construct
  misc_feature 1..397: note = Synthetic construct
  source 1..397: mol_type = other DNA
caggtgcagctggtgcaatctgggtctgagttgaagaagcctggggcctcagtgaaggtttcctgcaaggcttctggatacaccttcactaattatgctatgaattgggtgcggcaggcccctgggcaagggcttgagtggatgggatggatcaacaccaaaactgggaacgcaacttatgcccagggcttcacaggacgctttgtcttctccatggacacctctgtcagcacggcatatctgcagatcagcagcctaagggctgctgatagtgccgtgtattattgtgcgtccctaggacattgtcgtagtggcagctgtttagtccgaccagctgaggtctcgcagacctggttcgacccctggggccagggaaccccggtcaccgtctcctcag

SEQ ID NO: 2840 - DNA, 370 bp, synthetic construct
  misc_feature 1..370: note = Synthetic construct
  source 1..370: mol_type = other DNA
gaggtgcaactggtggagtctgggggaagtgtggtacggcctggggggtccctcagactctcctgtacagcctctggattcacctttggcgattatggcatgacctgggtccgccaagctccagggaagggcctggagtgggtcgctggtataaattttagtggtggtgtcaccagttatgcagactctgtgaagggccggttcaccatctccagagacaacgccaagaactccctccatctgcaaatgaacagtctgagagccgaggacacggccttgtattactgtgcgaaagatcgcagcctctccggatatagcagcagttgccacctcgactggggccagggaaccctggtcaccgtctcgtcag

SEQ ID NO: 2841 - DNA, 370 bp, synthetic construct
  misc_feature 1..370: note = Synthetic construct
  source 1..370: mol_type = other DNA
ggggtgcaattggtggagtctgggggaggtgtgatacggccgggggggtccctgagactctcctgtgcagcctccggattcagatttgatgattatgccatgacctgggtccgccaagttccagggaaggggctgcagtgggtcgctggcatcgattggaatggagagaattcgggttatgcagactctgtgaagggccgcttcaccatctccagagacaacgccaagaattccgtctttctacaaatgaacagtttgagagccgaggacacggccctctattactgtgcgagaggcctttatgagggatttgaatcaagtggtttttacagattctggggccagggaacctgggtcaccgtctcctcag

SEQ ID NO: 2842 - DNA, 361 bp, synthetic construct
  misc_feature 1..361: note = Synthetic construct
  source 1..361: mol_type = other DNA
gaggtgcagctggtggaatctgggggaggcttggtgcagcctggggggtccctgagactctcctgtgcagcctctggattcacctttagcagatatgccatgacctgggtccgccacgctgcagggaaggggctgcagtgggtctcagttataactgatagtggtgcgagcacagactacgcagactccgtgaagggccggttcaccatctccagagacaattccaagaacacactgtatctgcacatgtacagcctgagagccgaggacacggccctgtattactgtgttaaagctgagggcccgtatggtggctactttgaccaatggggccagggaacccaggtcaccgtctcctcag

SEQ ID NO: 2843 - DNA, 361 bp, synthetic construct
  misc_feature 1..361: note = Synthetic construct
  source 1..361: mol_type = other DNA
gaggtgcagctgttggagtctgggggaggcttggtacagcccggggggtccctgagactctcctgtgcagtctctggattcacctttagcagctatgccatgacctgggtccgccaggctccaggaaaggggctggagtgggtctcaactattagtggtagtggtggtaatacatattacgcagactccgtgaagggccggttcaccatctccagagacaattccaagaacacactttatctgcaaatgaacagcctgagagccgaggacacggccgtatattactgtgcgaaagtgaagtttggctatggctcccattttgatatctggggccaagggacaatggtcaccgtctcttcag

SEQ ID NO: 2844 - DNA, 373 bp, synthetic construct
  misc_feature 1..373: note = Synthetic construct
  source 1..373: mol_type = other DNA
gaggtgcaactggtggagtctgggggaggcttggttcagccagggcggtcccttagactctcctgtacagcttctgcattcatctttggtgattatgctatgacctgggtccgccaggctccagggaagggactggagtgggtaggtttcattagaagcaaagctaccggtgggacagcagaatacgccgcgtttgtgaaaggcagattcaccatctcaagagctgattccaaaagcatcgcctatctgcaaatgaacagcctggaaaccgaggacacagccgtgtattactgtgctagagtagaatcgtactactatgacagtagtgctgttgactactggggccagggaaccctggtcaccgtctcctcag

SEQ ID NO: 2845 - DNA, 373 bp, synthetic construct
  misc_feature 1..373: note = Synthetic construct
  source 1..373: mol_type = other DNA
gaggtgcagttgttggagtctgggggaggcttggtgcagcctggggggtccctgagactctcgtgtgcagactctggattcacctctggcacctatgccatgacctgggtccgccaggctccagggaaggggccggagtgggtctcaagtattagtgaaagtggtggtagcacatactacgcagactccgtgaagggccggttcagcatctccagagacaaaaccaagaacaccctatatctgcaaatgaccagcctgagagccgaagacacggccgtatatttctgcgcgaaatacaaccctcggggctacggtgactacgcggggtacctcgacccctggggccagggaaccctggtcaccgtctcctcag

SEQ ID NO: 2846 - DNA, 367 bp, synthetic construct
  misc_feature 1..367: note = Synthetic construct
  source 1..367: mol_type = other DNA
gaggtgcagttgttggagtctgggggaggcttcgtacactctggggggtccctgagactctcctgtgcagcctctcaattcacctttggcgactatgccatgacctgggtccgccaggctccagggaaggggctggaatgggtctcagttattagtggtagtggttctagcacattttacgcagactccgtgaagggccggttcaccatctccagagacaattccaagaatacgctgtttttgcaaatgaacagcctgagagccgacgacacggccgtatatttctgtgcgaaaatcaggccaatgactacggtgacgagctcctttgactactggggccagggaaccctggtcaccgtctcctcag

SEQ ID NO: 2847 - DNA, 376 bp, synthetic construct
  misc_feature 1..376: note = Synthetic construct
  source 1..376: mol_type = other DNA
gaggtgcagctggtggagtctgggggaggcttggtccagcctggggggtccctgagactctcctgtgtagcctctggaatcacttttagtaactattggatgacctgggtccgccaggctccagggaaggggctggagtggatggcctgcataaaccaggatggaactgagacatattatgtggactctatggagggccgattcaccatctccagagacaacaccctgaactcagtgtttctgcaaatgaagagcctgagagccgaggacacggctgtgtattactgtgcgagagataccgctacattacgaagtcacgggggggccggctggttcgccccctggggccagggaaccctggtcaccgtctcctcag

SEQ ID NO: 2848 - DNA, 370 bp, synthetic construct
  misc_feature 1..370: note = Synthetic construct
  source 1..370: mol_type = other DNA
gaggtgcagctgttggagtctgggggaggcatggtacagcctggggggtcccggagactctcctgtgcagcctctggattcacctttagaagctatggcatgacctgggtccgccaggctccagggaaggggctggagtgggtctcaactattattaatagtggtgggagcacatactacgcagactccgtgaagggccggttcaccatctccagagacaactccaagaacacgctttatctgcaaatgaacaccctgagagccgaagacacggccgtatattactgtgcgaaaccggggggctatggttcggggagtgatggtgcttttgatatctggggccaagggacaatggtcatcgtctcttcag

SEQ ID NO: 2849 - DNA, 367 bp, synthetic construct
  misc_feature 1..367: note = Synthetic construct
  source 1..367: mol_type = other DNA
gaggtgcagttgttggagtctgggggaggcttggtacagccgggggggtccctaagactctcctgttcaatgtctggattcacgtttggcagttttgccatgacctgggtccgccaggctccagggaaggggctggagtgggtctcaagcattagtcgcagtggtgatgcaacatactacgcagactttgtgaagggccggctcatcatctccagagacaattccaagagtaggctgtatctgcaaatgagcagcctgagagtcgaggacacggccgtatattactgtacgaatattcgagacgcatacagtgtcggttatggacttgattcctggggccagggagtcctggtcaccgtctcctcag

SEQ ID NO: 2850 - DNA, 364 bp, synthetic construct
  misc_feature 1..364: note = Synthetic construct
  source 1..364: mol_type = other DNA
gaggtgcaactggcggagtctggggggcgcttagtccgcccgggggagtccctgagactctcctgtgcagcctctggattcacatttaacaattatgccatgacctgggtccgccaggctccagggaaggggctggagtgggtctcaagtattagcgggagcgctggtaggacatactacgcagactccgtgaggggccgcttcaccatctccagagacaattccaggaacattctgtatctggaaatgcacaacctgagtctcgacgacacggccacatattactgtgcgaaaaggcaggcttatagcagctcgtcccccttgggccactggggccagggaaccctggtcaccgtctcctcag

SEQ ID NO: 2851 - DNA, 372 bp, synthetic construct
  misc_feature 1..372: note = Synthetic construct
  source 1..372: mol_type = other DNA
gaggtgcagctggtggagtctgggggaggcttggtacaccctggggggtccctgagactctcctgtgcagcctctggattcacctttagcgactatgccatgacctgggtccgccaggctccagggaaggggctggagtgggtctcagctattagtggtagtggttctagcacattctacgcagactccgtgaagggccggttcaccatctccagagacaattccaagaacaccctgtatctggaagtgaacagcctgagagccgacgacgcggccgtttattactgtgcgaaagatgtcagcaactacgggatttactattactactacatggacgtctggggtaaagggaccacggtcaccgtctcctca

SEQ ID NO: 2852 - DNA, 364 bp, synthetic construct
  misc_feature 1..364: note = Synthetic construct
  source 1..364: mol_type = other DNA
gaggtgcagctggtggagtctgggggaggcttggtccagcctggggggtccctgagactctcctgtgcagcctccggattcatctttagtaactattggatgacctgggtccgccaggctccagggaaggggctggagtgggtggccaacataaagcaagatggaagtgagaaatactatgtggactctgtgaagggccgattcaccatctccagagacaacgccaagaactcactgtatctgcaaatgaacagcctgagagccgaggacacggctgtgtattactgtgcgagttcggatgactacagtaactacggtccatttgactactggggccagggaaccctggtcaccgtctcctcag

SEQ ID NO: 2853 - DNA, 364 bp, synthetic construct
  misc_feature 1..364: note = Synthetic construct
  source 1..364: mol_type = other DNA
gaggtgcagctggtggagtctgggggaggcttggtccagcctggggggtccctgagactctcctgtgcagcctcgggattcatctttagtaactattggatgacctgggtccgccaggctccagggaaggggctggagtgggtggccaacataaagcaagatggaagtgagaaatactatgtggactctgtgaagggccgattcaccatctccagagacaacgccaagaactcactgtatctgcaaatgaacagcctgagagccgaggacacggctgtgtattactgtgcgagttcggatgactacagtaactacggtccatttgactactggggccagggaaccctggtcaccgtctcctcag

SEQ ID NO: 2854 - DNA, 370 bp, synthetic construct
  misc_feature 1..370: note = Synthetic construct
  source 1..370: mol_type = other DNA
gaggtgcagctggtggagtctgggggaggcttggtccagcttggggggtctctgagactctcctgtgcagcctctggattcacctttagaagcttttggatgacctgggtccgccaggctccagggaaggggctggagtgggtggccaacataaagtcagatggaagtgagaaatcctatgtggactctgtgaggggccgattcaccatctccagagacaacgccaagaactcactgtacctgcaaatgaacagcctgagagccgaggacacggctgtgtattactgtgctagaggtccccccagtggatacacctttggttcctactttgactcctggggccagggaaccctggtcaccgtctcctcag

SEQ ID NO: 2855 - DNA, 370 bp, synthetic construct
  misc_feature 1..370: note = Synthetic construct
  source 1..370: mol_type = other DNA
gaggtgcagctggtggagtctgggggaggcttcatacagcctggagggtccctgagactctcctgtgcagcctctggattcaccttcaatagttatgaaatgacctgggtccgccaggctccagggaaggggctggagtgggtttcacacattgctagtagtggtagaaccatatactacgcagactctgtgaagggccgattcaccatctccagagacagcgccaagaagtcagtccatctgcaaatgaacagcctgagagtcgaggacacggctctttattactgtgcgagaggagtcactagtggttaccactcttaccccctccttgacttctggggccagggaaccctggtcaccgtctcctcag

SEQ ID NO: 2856 - DNA, 387 bp, synthetic construct
  misc_feature 1..387: note = Synthetic construct
  source 1..387: mol_type = other DNA
gaggtgcacctggtggaatcggggggagccgtggtacagccagggcggtccctgagactctcctgtacaggcactggattcacttttgacgactatgctatgacctgggtccgccaggctcccgggaaggggctggagtgggtaggtctcattaaaggcaaagattttggcgggaaaacagaatttgccgcgtctgtgaaaggcagattctccatctcaagagaagactcgaaaggcatcgcccatctgcaaatgaacagtctgaaaaccgaggacacagccgtgtacttctgtgcccgagctcggggaacatataactgggactctggggcctactcttacttcatggacgtctggggcaaagggaccgcggtcaccgtctcctca

SEQ ID NO: 2857 - DNA, 367 bp, synthetic construct
  misc_feature 1..367: note = Synthetic construct
  source 1..367: mol_type = other DNA
gaggtgcagttgttggagtctgggggagacttggtacaccccggggggtccctgagactctcctgtgcagcctctgaattcacttttggcgactatgccatgacctgggtccgccaggttccagggaaggggctggagtgggtctcagttattagtgggagtggttccaggatattttacgcagactccgtgaagggccggttctccatctccagagacaattccaagaacactctatttttgcaaatgaacagcctgagagccgacgacacggccatttatttctgtgcgaaaattaggccaatgactacggtgacgagcgcgtttgacctctggggccagggaacccaggtcaccgtctccgcag

SEQ ID NO: 2858 - DNA, 355 bp, synthetic construct
  misc_feature 1..355: note = Synthetic construct
  source 1..355: mol_type = other DNA
gaagtgaaactggtagaatctgggggaggcttggtccagccgggggggtccctgagactctcctgtgaagcctctggattcagttttacttcgttttggatgacgtgggtccgccaggctccagggaaggggctggagctgctgggcaacataaacctagacggaagtttccaaacctatgtggactccattaggggccgattcttcatctccagagacaacgccaggaactcagtgtacctgcacatgaacagcctgagagtcgacgacacggctatctattactgtggaagagatccgggatacagtagcttggacgtctggggcacaggcattatggtcacagtctcctcag

SEQ ID NO: 2859 - DNA, 387 bp, synthetic construct
  misc_feature 1..387: note = Synthetic construct
  source 1..387: mol_type = other DNA
gaggtgcagctggtggaatctgggggaggcttggtacagccagggcggtccctgagactctcctgtaaagcctctggattcagttttgatgattatgccatgacgtgggtccgccaggctcccgggaaggggctggagtgggtaggtctcattaaaagcagagcttatagtgggacgacagaatatggcgcgtccgtgaaaggcagattcaccatctcgagagatgatcccaaaagcatcgcctatctgcaaatgaccaccctgaaaaccgacgacacagccgtgtacttctgtgctcgaggtcggggaacctatgactggaactccggggcctactactacttcatggacgtgtggggtaaagggaccacagtcaccgtctcctca

SEQ ID NO: 2860 - DNA, 399 bp, synthetic construct
  misc_feature 1..399: note = Synthetic construct
  source 1..399: mol_type = other DNA
gaagggcagctggtggagtctgggggaggcctcgtccaggcgggggggtccctgagaatttcctgtgcggcctctggattcaggtttggtgaacattacatgacgtgggtgcgccagactcaagggaagaggctggaatgggtggccagcataaaacaggattcaggcgcgagattttatgcggactctgtgaagggccgattcagcatttcgagaaacaatggttataatactttgactctcgaaatgagaaacctgagagtcgacgacacggctgtctactattgcacgagaggaggcggccatttgctccgggcaggctatgagtggtccccgggagatcaaacattccacttcatgaacgtctggggcaaggggaccacggtcttcgtctcctca

SEQ ID NO: 2861 - DNA, 352 bp, synthetic construct
  misc_feature 1..352: note = Synthetic construct
  source 1..352: mol_type = other DNA
caggtgcagctggtggagtctgggggaggcttggtcaagcctggagggtccctaagactctcctgtgcagtctctggattcaccgtcactgaccaattcatgacttggatccgccaggctccagggaagggcctggagtgggttgcgtacattgatagtggtgttaggcccctatattacgcagactctgtgaagggccgattcaccatctccagggacaacgccaacaattccttgtatctacaaatgaccagcctgagagccgacgacacggctgtctattattgtgcgacttatcccacgggcattttgaactcctggggccagggaaccctggtcaccgtctcctcag

SEQ ID NO: 2862 - DNA, 361 bp, synthetic construct
  misc_feature 1..361: note = Synthetic construct
  source 1..361: mol_type = other DNA
caggtgcgactggtggagtctgggggaggcttggtcgagcctggagggtccctgagactctcctgtgcagcctctggattcaccttcagtggttcctacatgacttggatccgccaggctccagggaaggggctggagtggatttcatatattagtcaaagtggcagcaggaaatactacgcagactctgtggagggccgattctccatctccagggacaacgccaggaactcactatttttgcaaatgaacagcctgagagtcggagacacggctgtatattactgtgcggcctcttacaatatccagggtttggtccttgactactggggccagggatccctggtcaccgtctcctcag

SEQ ID NO: 2863 - DNA, 367 bp, synthetic construct
  misc_feature 1..367: note = Synthetic construct
  source 1..367: mol_type = other DNA
gaagggcagttgtcggagtccgggggaggcttggttcagccgggggggtccctgagactctcctgtgcagcctctggattcaccttcggccgccatgccatgacttgggtccgccaggcgccagggaaggggctggagtgggtcgcaagtgttgacgaaactgccactggcacatactacgcggactccgtgaagggccggttcaccatctccagagacaactccaagaatacactatatctgcagatgaacagcctgagagccgaggacacggccctgtattactgtgcgaaacacaaaggggagtcctatatttcttgggctcttgatttgtggggccaagggacattggtcaccgtctcttcag

SEQ ID NO: 2864 - DNA, 376 bp, synthetic construct
  misc_feature 1..376: note = Synthetic construct
  source 1..376: mol_type = other DNA
gaggtgcaactgttggagtctgggggaggcttggtacagcctggggggtccctgagaatctcctgtgcagcctctggattcatcttcaataactatgccatgacttgggtccgcgagactccagggaaggggctggagtgggtctcaggtattagtgctagtggtggaaacacatactacgcagactccgtgaagggccgcctcaccatctccagagacaataccaagaacacactgtttctgcaaatgaacagcctgagagtcgaggacacggccgtctattattgtgcgaaaaccccctcaagaagtgtaagcagtagctggccctattactttgactattggggccagggaacccgggtcaccgtctcctctg

SEQ ID NO: 2865 - DNA, 387 bp, synthetic construct
  misc_feature 1..387: note = Synthetic construct
  source 1..387: mol_type = other DNA
caggtgcagctggtggagtctgggggaggcttggtcaagcctggagggtccctgagactctcctgtgcagcctctggattcaccttcagtgactactacatgagctggatccgccaggctccagggaaggggctggagtgggtctcatacattagtagtagtggtagtaccatatactacgcagactctgtgaagggccgattcaccatctccagggacaacgccaagaactcactgaatctgcaaatgaatagcctgagagccgaggacacggctgtatattactgtgcgaggaacgtatattgtagtggtggtagctgctactccgactactactactactacatggacgtctggggcaaagggaccacggtcaccgtctcctca

SEQ ID NO: 2866 - DNA, 370 bp, synthetic construct
  misc_feature 1..370: note = Synthetic construct
  source 1..370: mol_type = other DNA
caggtgcagctggtggagtctgggggaggcttggtcaagcctggagggtccctgagactctcctgtgcagcctctggattcaccttcagtgactactacatgagctggatccgccaggctccagggaaggggctggagtgggtttcatacattagtagtagtggtagtaccatatactacgcagactctgtgaagggccgattcaccatctccagggacaacgccaagaactcactgtatctgcaaatgaacagcctgagagccgaggacacggctgtgtattactgtgcgagaccagaaagtgggagctactactcgccctggttcttcgaatgctggggccagggaaccctggtcaccgtctcctcag

SEQ ID NO: 2867 - DNA, 364 bp, synthetic construct
  misc_feature 1..364: note = Synthetic construct
  source 1..364: mol_type = other DNA
caggtgcagctggtggagtctgggggaggcttggtcaagcctggagggtccctgagactctcctgtgcagcctctggattcaccttcagtgactactacatgagctggatccgccaggctccagggaaggggctggagtgggtttcatacattagtagtagtggtagtaccatatactacgcagactctgtgaagggccgattcaccatctccagggacaacgccaagaactcactgtatctgcaaatgaacagcctgagagccgaggacacggctgtgtattactgtgcgagagacaagtatagtgggaccacggatgcttttgatatctggggccaagggacaatggtcaccgtctcttcag

SEQ ID NO: 2868 - DNA, 367 bp, synthetic construct
  misc_feature 1..367: note = Synthetic construct
  source 1..367: mol_type = other DNA
caggtgcagctggtggagtctgggggaggcttggtcaagcctggagggtccctgagactctcctgtgcagcctctggattcaccttcagtgactactacatgagctggatccgccaggctccagggaaggggctggagtgggtttcatacattagtagtagtggtagtaccatatactacgcagactctgtgaagggccgattcaccatctccagggacaacgccaagaactcactgtatctgcaaatgaacagcctgagagccgaggacacggctgtgtattactgtgcgagagacccacgagcgtataccgatccccgctggttcgacccctggggccagggaaccctggtcaccgtctcctcag

SEQ ID NO: 2869 - DNA, 361 bp, synthetic construct
  misc_feature 1..361: note = Synthetic construct
  source 1..361: mol_type = other DNA
caggtgcagctggtggagtctgggggaggcttggtcaagcctggagggtccctgagactctcctgtgcagcctctggattcaccttcagtgactactacatgagctggatccgccaggctccagggaaggggctggagtgggtttcatacattagtagtagtggtaataccatatactacgcagactctgtgaagggccgattcaccatctccagggacaccgccaagaactcactgtatctgcaaatgaacagcctgagagccgaggacacggctgtgtattactgtgcgagagcgggggggttcatggttcggggactcgactactggggccagggaaccctggtcaccgtctcctcag

SEQ ID NO: 2870 - DNA, 379 bp, synthetic construct
  misc_feature 1..379: note = Synthetic construct
  source 1..379: mol_type = other DNA
caggtgcaactggtggagtctgggggaggcttggtcaagcctggagggtccctgagactctcctgtgtaggctctggattcaccttcggagactacgacatgagctggatccgccaggctccagggaaggggttggagtggctttcatatattagtagcagtggtagtaccaagagttacgcagactctgtgaagggccgattcaccatctccagggacaacgccaagagctcactgtttctggaaatgaacaccctgagagccgaggacacggctgtgtacaactgtgcgagagaaataagaggcgtgggctatagtagtggttattacggctggttcgacccctggggccagggaaccctggtcaccgtctcctcag

SEQ ID NO: 2871 - DNA, 360 bp, synthetic construct
  misc_feature 1..360: note = Synthetic construct
  source 1..360: mol_type = other DNA
caggtgcaactggtggagtctgggggaggcttggtcaagcctggagggtccctgagactctcctgtgcagcctctggattcgacttcagtgactactacatgagctggatccgccaggctccggggaaggggctggagtgggtgtcatacattagtagtagtggcaacaccaaatactacgcagactctctgttgggccgcttcaccgtctccagggacaacgccaagaactctctgtatctgcaaatgagcagcctgagatccgacgacacggctgtgtattactgtgcgagagtccgtacgtccctctactactacatggacgtctggggcaaagggaccacggtcaccgtctcctca

SEQ ID NO: 2872 - DNA, 367 bp, synthetic construct
  misc_feature 1..367: note = Synthetic construct
  source 1..367: mol_type = other DNA
caggtgcagctggtggagtctgggggaggcttggtcaagcctggagggtccctgagactctcctgtgcagcctctggattcaccttcagggactactacatgagctggattcgccaggctccagggaaggggctggagtgggtttcatacattagtagtagtggaagtaccacatactatgcagactctgtgaagggccgattcaccatctccagggacaacgccaacaactcactgtatctgcaaatgaacagtctgagagccgaggacacggctatatattactgtgcgagagatggtgtactactacgaagcttaaagcggttcgacccctggggccagggaaccctggtcaccgtctcctcag

SEQ ID NO: 2873 - DNA, 360 bp, synthetic construct
  misc_feature 1..360: note = Synthetic construct
  source 1..360: mol_type = other DNA
gaggtgcagttggtggagtctgggggaagtgtggtacggccgggggggtccctgagactctcctgtgcagccgctggattcaggtttgatgattatggcatgagctgggtccgccaagttccagggaaggggctggagtgggtctctggtattaattggtatggagaaaggacaggttatgcagactctgtgaaggaccgattcgccatctccagagacaatggcaagaactccctatatctggaattgaacagtctgggggtcgaggacacggccgtctactactgtgcgagagggtgggcaacagatggctactacatggacctctggggcaaagggaccacggtcaccgtctcctca

SEQ ID NO: 2874 - DNA, 388 bp, synthetic construct
  misc_feature 1..388: note = Synthetic construct
  source 1..388: mol_type = other DNA
gacgctcaagttttggagtctgggggaggcttggtgcagcctggggggtccctgagactctcctgtgtcgcctctggattcaccttcagcggtgattcaatgagctgggtccgccagactccaggcaagggactggagtgggtcgcaactattactggaagtggtgataacatgttctacggcggctccgtggggggccgcttcaccatttccagagataattccgaaaacatggtttttctacaaatgaacaacctcagaggcgacgacacggccgtatattactgtgcgaaagggggtccagatgcggctgtctggacgaattctcaactctcttttcatccctttgtctcgtggggcccgggatccctggtcaccgtctcctcag

SEQ ID NO: 2875 - DNA, 364 bp, synthetic construct
  misc_feature 1..364: note = Synthetic construct
  source 1..364: mol_type = other DNA
gaggtgcagctggtggagtctgggggaggcttggtacagcctggggggaccctgagactctcctgtgcagcctctggattcacctttagcaactatgccatgagctgggtccgccaggctccagggaaggggctcgagtgggtctcaggtcttaccggtggtggtgctatcacagactacgcagactccgtgaagggtcgattcaccatctccagagacaattccaacaatacgttgtttctgcaaatgaccagcctgagagccgacgacacggccatatattactgcgcgaaagtaagactgatacggcccgaggggttctttgactattggggccagggaaccccggtcaccgtctcctcag

SEQ ID NO: 2876 - DNA, 367 bp, synthetic construct
  misc_feature 1..367: note = Synthetic construct
  source 1..367: mol_type = other DNA
gaggtgcagctgttggagtctgggggaggcttggtacagcctggggggtccctgagactctcctgtgtagcctctggattcacctttagcagctacgccatgagctgggtccgccaggctccagggaaggggctggaatggatctcaggtattagtggtaatggtggtagcacatacgacgcagactccgtgaagggccgattcaccatctccagagacagttccaagaacactctgtttctgcaaatgaatagcctgataaccgaggacacggccgtatatttctgtgcgaaagacctctcttgtggtggtggtagctgtttttcccgggtttctgactactggggccagggaaccttggtcaccg

SEQ ID NO: 2877 - DNA, 403 bp, synthetic construct
  misc_feature 1..403: note = Synthetic construct
  source 1..403: mol_type = other DNA
gaggtgcagctggaggagtctgggggaggcttggtccagcctggggggtccctgagactctcctgtgcagcctctggagtcaacgtcagtagcaactacatgagctgggtccgccaggctccagggaaggggctggagtggatctcaggtctttatggcgttagaagcacatattacgcagactccgtgaagggcagattcaccatctccagagacaattccaagaatatactgtatcttcaaatgaacagcctgagagccgaggacacggctgtgtatttctgtgcgagaggcaaaacttcttactatgatagagacaaaccgttttactatgatagtagtggtaagggtccccactgctttgactactggggccagggatccctggtcaccgtctcctcag

SEQ ID NO: 2878 - DNA, 376 bp, synthetic construct
  misc_feature 1..376: note = Synthetic construct
  source 1..376: mol_type = other DNA
gaggtgcagctggtggagtctgggggaggcttgataaagcctggggggtccctgagactctcctgcgtagcctctggattcactttcagaaacgcctggatgagctgggtccgccaggctccagggaaggggctggagtggattggtcgtattaaaagcaaccttcttggtgcgacagcagaattcggcgcacccgtgaaaggcaggttcaccatctcaagagatgattcaaaaaacacggtgtatctacagatgaacagcctgaaaaccgaggacacagccgtgtattactgtaccacagattggggttcgacgactcattatattcaggcttttgatatctggggccaagggacaatggtcaccgtctcttcag

SEQ ID NO: 2879 - DNA, 373 bp, synthetic construct
  misc_feature 1..373: note = Synthetic construct
  source 1..373: mol_type = other DNA
gaggtgcagctggtggagtctgggggaggcttggtacagccagggcggtccctgagactctcctgtacagcttctggattcacctttggggattttgctatgagctgggtccgccaggctccagggaaggggctggagtgggtaggtttaattagaagtaaagcttatggtgagacaacagaatacgccgcgtctgtgaaaggcagattcaccatctcaagagatgtatccagaagcatcgcctatctgcaaatgaacagcctgaaaaccgaagacacagccctttattactgtactagagattgggactactatgatagtagtggttactccagtcactggggccagggagccctggtcaccgtctcctcag

SEQ ID NO: 2880 - DNA, 385 bp, synthetic construct
  misc_feature 1..385: note = Synthetic construct
  source 1..385: mol_type = other DNA
gaggtgcagctggtggagtctgggggaggcttggtacagccagggcggtccctgagactctcctgtacagcttctggattcacctttggtgattatgctatgagctgggtccgccaggctccagggaaggggctggagtgggtaggtttcattagaagcaaagcttatggtgggacaacagaatacgccgcgtctgtgaaaggcagattcaccatctcaagagatgattccaaaagcatcgcctatctgcaaatgaacagcctgaaaaccgaggacacagccgtgtattactgtactagaccggcggctgatagcagcagctggtacagccgccttacctactttgactactggggccagggaaccctggtcaccgtctcctcag

SEQ ID NO: 2881 - DNA, 364 bp, synthetic construct
  misc_feature 1..364: note = Synthetic construct
  source 1..364: mol_type = other DNA
gaggtgcagctggtggagtctgggggaggcttggtacagccagggcggtccctgagactctcctgtacagcttctggattcacctttggtgattatgctatgagctgggtccgccaggctccagggaaggggctggagtgggtaggtttcattagaagcaaagcttatggtgggacaacagaatacgccgcgtctgtgaaaggcagattcaccatctcaagagatgattccaaaagcatcgcctatctgcaaatgaacagcctgaaaaccgaggacacagccgtgtattactgtactagagagctctccatagagggagcttttgatatctggggccaagggacaatggtcaccgtctcttcag

SEQ ID NO: 2882 - DNA, 379 bp, synthetic construct
  misc_feature 1..379: note = Synthetic construct
  source 1..379: mol_type = other DNA
gaggtgcagctggtggagtctgggggaggcttggtacagccagggcggtccctgagactctcctgtacagcttctggattcacctttggtgattatgctatgagctgggtccgccaggctccagggaaggggctggagtgggtaggtttcattagaagcaaagcttatggtgggacaacagaatacgccgcgtctgtgaaaggcagattcaccatctcaagagatgattccaaaagcatcgcctatctgcaaatgaacagcctgaaaaccgaggacacagccgtgtattactgtactagagatcttctcggggtcttctcggaggggattggttggttcgacccctggggccagggaaccctggtcaccgtctcctcag

SEQ ID NO: 2883 - DNA, 382 bp, synthetic construct
  misc_feature 1..382: note = Synthetic construct
  source 1..382: mol_type = other DNA
gaggtgcagctggtggagtctgggggaggcttggtacagccagggcggtccctgagactctcctgtacagcttctggattcacctttggtgattatgctatgagctgggtccgccaggctccagggaaggggctggagtgggtaggtttcattagaagcaaagcttatggtgggacaacagaatacgccgcgtctgtgaaaggcagattcaccatctcaagagatgattccaaaagcatcgcctatctgcaaatgaacagcctgaaaaccgaggacacagccgtgtattactgtactagagccccggggaggggatttaggtatggttcggggagccactttgactactggggccagggaaccctggtcaccgtctcctcag

SEQ ID NO: 2884 - DNA, 361 bp, synthetic construct
  misc_feature 1..361: note = Synthetic construct
  source 1..361: mol_type = other DNA
gaggtgaaactggaggagtccggaggaggcctggtccagccgggggggtcccaaagactctcctgtgcagcctctggcttcatcgtcactagcaactacatgagctgggtccgccaggctccagggaaggggctggagtgggtcgcagttatgtatcctggtggtttcgcattctatggagactccgtgaagggccgattcaccatctccagacacaattccaacaacacggtgtttcttcaaatgaatagcctgagacctgaggacacggccgtctattactgtgcgagaggggtggctacgacctaccaatatcactttgacttctggggccagggaactttggtcaccgtctcctcag

SEQ ID NO: 2885 - DNA, 376 bp, synthetic construct
  misc_feature 1..376: note = Synthetic construct
  source 1..376: mol_type = other DNA
gaggtgcaactggtggagtctggaggaggcttggtccagcctggggggtccctgagactctcctgtgcagcctctgggttcaccgtcactagcaactacatgagctgggtccgccaggctccagggaaggggctggagtgggtctcaactatttatagtggtggtagtacatattatgcagactccgttaacggccgattcaccatctccagacacaattccaagaacacgctgtatcttcaaatgaacagcctgagagcggaggacacggccgtttattactgtgcgagagatcgcatcagttttacgactggtgtggtcccggactggaacttcgatctctggggccgtggcaccctggtcactgtctcctcag

SEQ ID NO: 2886 - DNA, 376 bp, synthetic construct
  misc_feature 1..376: note = Synthetic construct
  source 1..376: mol_type = other DNA
gaggtgcagctagtggagtctgggggaggcttggtacagccgggggggtccctgagactctcctgtgcagcctctggattcacctttatcaactatcccatgagctgggtccgccaggctccagggaaggggctggagtgggtctcaagtattggtggtagtggtgcttacaaatactacgcagactccgtgaagggccggttcaccatctccagagacaattccaagaacacggtgtatctgcaaatgaacagcctgagagacgaggacacggccgtatattactgtgcgaaacatttaacgaccagtattgttgtggtggtagctgcacgatttgtctcctggggccagggaaccctggtcaccgtctcctcag

SEQ ID NO: 2887 - DNA, 364 bp, synthetic construct
  misc_feature 1..364: note = Synthetic construct
  source 1..364: mol_type = other DNA
gaggtgcaactggtggagtctgggggaaccttggtacagcctggggggtccctgagactctcctgtgcagcctctggattcacctttagcaactatggcatgagctgggtccgccaggctccagggaaggggctggagtgggtctcacatactagtggtagtggtggaagaacatactacgcagactccgtgaagggccggttcaccatctccagagacaattccaagaacacgctgtttttgcaaatgaacagcctgagagccgaggacacggccgtatattactgtgcgaagttggactacagtaacttacgacagagatttgactactggggccagggaaccctggtcaccgtctcctcag

SEQ ID NO: 2888 - DNA, 358 bp, synthetic construct
  misc_feature 1..358: note = Synthetic construct
  source 1..358: mol_type = other DNA
gaggtgcagctgttggagtctgggggaggcttggttcagcctggggagtccctgagaatttcctgtgcagcctctggattcacctttagcagctatgccatgagctgggtccgccaggctccagggaaggggctggagtgggtctcagccattagtggaagtggtgatagtacatatcacgcagactccgtgaagggccggttcaccatctccagagacaattccaagaacactctgtatctgcaaatgagcagcctgagagccgaggacacggccgtatattactgtgcgaaagatccctcctctatagtgggagccttcgactggggccagggaaccctggtcactgtctcctcag

SEQ ID NO: 2889 - DNA, 349 bp, synthetic construct
  misc_feature 1..349: note = Synthetic construct
  source 1..349: mol_type = other DNA
gaggtgcaacttgtggagtctgggggaggcttggtacaaccgggggggtccctgagactctcctgtgcagcctctggattcacatttgacatctatgccatgagctgggtccgccaggctccagggaaggggctggagtgggtctcagctattggtggtagtggtggtcccacagagtacgcagactccgtgaagggccggttcaccatctccagagacaactccaagaacacactgtatctgcaaatgaacagcctgagagccgaggacacggccatatattactgtgcgaagcctatagcaggtcgtccttccgtgggccagggaaccctggtcaccgtctcctcag

SEQ ID NO: 2890 - DNA, 366 bp, synthetic construct
  misc_feature 1..366: note = Synthetic construct
  source 1..366: mol_type = other DNA
gaggtgcagctggtggagtctgggggaggcttggtacagcctggggggtccctgagactctcctgtgcagcctctggattcacctttagcagctatgccatgagctgggtccgccaggctccagggaaggggctggagtgggtctcagctattagtggtagtggtggtagcacatactacgcagactccgtgaagggccggttcaccatctccagagacaattccaagaacacgctgtatctgcaaatgaacagcctgagagccgaggacacggccgtatattactgtgcgaaaccgaaggaggaagagccctcatactactacatggacgtctggggcaaagggaccacggtcaccgtctcctca

SEQ ID NO: 2891 - DNA, 355 bp, synthetic construct
  misc_feature 1..355: note = Synthetic construct
  source 1..355: mol_type = other DNA
gaggtgcagctggtggagtctgggggaggcttggtacagcctggggggtccctgagactctcctgtgcagcctctggattcacctttagcagctatgccatgagctgggtccgccaggctccagggaaggggctggagtgggtctcagctattagtggtagtggtggtagcacatactacgcagactccgtgaagggccggttcaccatctccagagacaattccaagaacacgctgtatctgcaaatgaacagcctgagagccgaggacacggccgtatattactgtgcgaaagataaacgggctgcccccttagactactggggccagggaaccctggtcaccgtctcctcag

SEQ ID NO: 2892 - DNA, 373 bp, synthetic construct
  misc_feature 1..373: note = Synthetic construct
  source 1..373: mol_type = other DNA
gaggtgcagctggtggagtctgggggaggcttggtacagcctggggggtccctgagactctcctgtgcagcctctggattcacctttagcagctatgccatgagctgggtccgccaggctccagggaaggggctggagtgggtctcagctattagtggtagtggtggtagcacatactacgcagactccgtgaagggccggttcaccatctccagagacaattccaagaacacgctgtatctgcaaatgaacagcctgagagccgaggacacggccgtcttttactgtgcgaaagattactatggttcggggacttattatatgggagcttttgatatctggggccaagggacaatggtcaccgtctcttcag

SEQ ID NO: 2893 - DNA, 364 bp, synthetic construct
  misc_feature 1..364: note = Synthetic construct
  source 1..364: mol_type = other DNA
gaggtgcagctgttggagtctgggggaggcttggtacagcctggggggtccctgagactctcctgtgcagcctctggattcacctttagcagctatgccatgagctgggtccgccaggctccagggaaggggctggagtgggtctcagctattagtggtagtggtggtagcacatactacgcagactccgtgaagggccggttcaccatctccagagacaattccaagaacacgctgtatctgcaaatgaacagcctgagagccgaggacacggccgtatattactgtgccagggaggacagcagtggctggtatgatgcttttgatatctggggccaagggacaatggtcaccgtctcttcag

SEQ ID NO: 2894 - DNA, 367 bp, synthetic construct
  misc_feature 1..367: note = Synthetic construct
  source 1..367: mol_type = other DNA
gaggtgcagctgttggagtctgggggaggcttggtacagcctggggggtccctgagactctcctgtgcagcctctggattcacctttagcagctatgccatgagctgggtccgccaggctccagggaaggggctggagtgggtctcagctattagtggtagtggtggtagcacatactacgcagactccgtgaagggccggttcaccatctccagagacaattccaagaacacgctgtatctgcaaatgaacagcctgagagccgaggacacggccgtatattactgtgcgaaacgggggcctgatagtagtgggtcgggcgcttttgatatctggggccaagggacaatggtcaccgtctcttcag

SEQ ID NO: 2895 - DNA, 364 bp, synthetic construct
  misc_feature 1..364: note = Synthetic construct
  source 1..364: mol_type = other DNA
gaggtgcagctgttggagtctgggggaggcttggtacagcctggggggtccctgagactctcctgtgcagcctctggattcacctttagcagctatgccatgagctgggtccgccaggctccagggaaggggctggagtgggtctcagctattagtggtagtggtggtagcacatactacgcagactccgtgaagggccggttcaccatctccagagacaattccaagaacacgctgtatctgcaaatgaacagcctgagagccgaggacacggccgtatattactgtgcgaaagagggtagtggttattactcaaactggttcgacccctggggccagggaaccctggtcaccgtctcctcag

SEQ ID NO: 2896 - DNA, 373 bp, synthetic construct
  misc_feature 1..373: note = Synthetic construct
  source 1..373: mol_type = other DNA
gaggtgcagctgttggagtctgggggaggcttggtacagcctggggggtccctgagactctcctgtgcagcctctggattcacctttagcagctatgccatgagctgggtccgccaggctccagggaaggggctggagtgggtctcagctattagtggtagtggtggtagcacatactacgcagactccgtgaagggccggttcaccatctccagagacaattccaagaacacgctgtatctgcaaatgaacagcctgagagccgaggacacggccgtatattactgtgcgaaagatcgagggaagatttactatgatagtagtggccaacaggactactggggccagggaaccctggtcaccgtctcctcag

SEQ ID NO: 2897 - DNA, 376 bp, synthetic construct
  misc_feature 1..376: note = Synthetic construct
  source 1..376: mol_type = other DNA
gaggtgcagctgttggagtctgggggaggcttggtacagcctggggggtccctgagactctcctgtgcagcctctggattcacctttagcagctatgccatgagctgggtccgccaggctccagggaaggggctggagtgggtctcagctattagtggtagtggtggtagcacatactacgcagactccgtgaagggccggttcaccatctccagagacaattccaagaacacgctgtatctgcaaatgaacagcctgagagccgaggacacggccgtatattactgtgcgaaagatcgggcattacgatattttgactggttatttgatgcttttgatatctggggccaagggacaatggtcaccgtctcttcag

SEQ ID NO: 2898 - DNA, 361 bp, synthetic construct
  misc_feature 1..361: note = Synthetic construct
  source 1..361: mol_type = other DNA
gaggtgcagctgttggagtctgggggaggcttggtacagcctggggggtccctgagactctcctgtgcagcctctggattcacctttgacaactatgccatgagctgggtccgccaggctccagggaaggggctggagtgggtctcagctattagtgctagtggtactataacatattacgcagactccgtgaagggccggttcaccatttccagagagtattccaagaacagcctgtatctgcaaatgcacagcctcagagccgaagacacggccgtttattactgtgcgaaagccccaggatatagcaatactgcttttgatttctggggccaagggacaatggtcaccgtctcctcag

SEQ ID NO: 2899 - DNA, 367 bp, synthetic construct
  misc_feature 1..367: note = Synthetic construct
  source 1..367: mol_type = other DNA
gaggtgcagctgttggagtctgggggaggcttggtacagcctggggggtccctgagactctcctgtgcagcctctggattcacctttagcagctatgccatgagctgggtccgccaggctccagggaaggggctggagtgggtctcagctattagtggtagtggtggtagcacatactacgcagactccgtgaagggccggttcaccatctccagagacaattccaagaacacgctgtatctgcaaatgaacagcctgagagccgaggacacggccgtatattactgtgcgaaagtcggggacgtattacgatattttgactggtatgactactggggccagggaaccctggtcaccgtctcctcag

SEQ ID NO: 2900 - DNA, 364 bp, synthetic construct
  misc_feature 1..364: note = Synthetic construct
  source 1..364: mol_type = other DNA
gaggtgcagctgttggagtctgggggaggcttggtacagcctggggggtccctgagactctcctgtgcagcctctggattcacctttagcagctatgccatgagctgggtccgccaggctccagggaaggggctggagtgggtctcagctattagtggtagtggtggtagcacatactacgcagactccgtgaagggccggttcaccatctccagagacaattccaagaacacgctgtatctgcaaatgaacagcctgagagccgaggacacggccgtatattactgtgcgaaatgggggctatggttcggggagttggactttgactactggggccagggaaccctggtcaccgtctcctcag

SEQ ID NO: 2901 - DNA, 367 bp, synthetic construct
  misc_feature 1..367: note = Synthetic construct
  source 1..367: mol_type = other DNA
gaggtgcagctgttggagtctgggggaggcttggtacagcctggggggtccctgagactctcctgtgcagcctctggattcacctttagcagctatgccatgagctgggtccgccaggctccagggaaggggctggagtgggtctcagctattagtggtagtggtggtagcacatactacgcagactccgtgaagggccggttcaccatctccagagacaattccaagaacacgctgtatctgcaaatgaacagcctgagagccgaggacacggccgtatattactgtgcgaatcccgattacgatattttgactgtgaactggttcgacccctggggccagggaaccctggtcaccgtctcctcag

SEQ ID NO: 2902 - DNA, 352 bp, synthetic construct
  misc_feature 1..352: note = Synthetic construct
  source 1..352: mol_type = other DNA
gaggtgcagctgttggagtctgggggaggcttggtacagcctggggggtccctgagactctcctgtgcagcctctggattcacctttagcagctatgccatgagctgggtccgccaggctccagggaaggggctggagtgggtctcagctattagtggtagtggtggtagcacatactacgcagactccgtgaagggccggttcaccatctccagagacaattccaagaacacgctgtatctgcaaatgaacagcctgagagccgaggacacggccgtatattactgtgcgaatcttataggagggtactttggctactggggccagggaaccctggtcaccgtctcctcag

SEQ ID NO: 2903 - DNA, 385 bp, synthetic construct
  misc_feature 1..385: note = Synthetic construct
  source 1..385: mol_type = other DNA
gaggtgcagttggtggagtctgggggaggcttggtacagcctggggggtccctgagactctcctgtgcagcctctggattcggctttagcagctttgccatgagctgggtccgccaggctccagggaaggggctggagtgggtctcagctattagtggtggtggtcgtcacacatactacgcagactccgcgaggggccggttcaccatctccagagacaattccaagaacacagtgtatctgcacatgaacagcctgagagccgaggacacggccgcatattactgtgcgaagacagcatattgtggtggggattgctcttctagagtcactgcatacttctttgactcctggggccagggaaccctggtcaccgtctcctcag

SEQ ID NO: 2904 - DNA, 364 bp, synthetic construct
  misc_feature 1..364: note = Synthetic construct
  source 1..364: mol_type = other DNA
gaggtgcagctggtggagtctgggggaaccttggtacagcctggggggtccctgagactctcctgtgcagtctctggattcacctttagcacctatgccatgagctgggtccgccaggctccagggaaggggctggagtgggtctcaggtatcagtggcagtggtggtaccacatactacgcagactccgtgaagggccggttcaccatctccagagacaattccaagaacacgctgtatctgcaaatgaacagcctgagagccgaggacacggccatatattactgtgcgaaatcccgggcagtggctgggtacgattactttgactactggggccagggaaccctggtcaccgtctcctcag

SEQ ID NO: 2905 - DNA, 364 bp, synthetic construct
  misc_feature 1..364: note = Synthetic construct
  source 1..364: mol_type = other DNA
gaggtgcagctggcggaatctgggggagacttcgtacagccgggggggtccctgagactctcttgtgcagcctctggattcacctttagcagctatgccatgagctgggtccgccaggctccagggaaggggctggagtgggtctcagttattggtgggagtggtggttctacatcctatacagactccgtgaagggccggttcatcatctccagagacaatttgaagaacacgctgtttctgcaaatgaacagcctgagagtcgaggatacggccgtatactactgtgcgagaaggcagggctacagtagttcgtccccgttgaaatactggggccagggaatcctggtcaccgtcgcctcag

SEQ ID NO: 2906 - DNA, 373 bp, synthetic construct
  misc_feature 1..373: note = Synthetic construct
  source 1..373: mol_type = other DNA
gaggtgcagctggtggagactggaggaggcttgatccagcctggggggtccctgagactctcctgtgcagcctctgggttcaccgtcagtagcaactacatgagctgggtccgccaggctccagggaaggggctggagtgggtctcagttatttatagcggtggtagcacatactacgcagactccgtgaagggccgattcaccatctccagagacaattccaagaacacgctgtatcttcaaatgaacagcctgagagccgaggacacggccgtgtattactgtgcgagagacttttggggttactatggttcggggattagaaaagagtttgatatctggggccaagggacaatggtcaccgtctcttcag

SEQ ID NO: 2907 - DNA, 373 bp, synthetic construct
  misc_feature 1..373: note = Synthetic construct
  source 1..373: mol_type = other DNA
gaggtgcagctggtggagactggaggaggcttgatccagcctggggggtccctgagactctcctgtgcagcctctgggttcaccgtcggtagcaactacatgagctgggtccgccaggctccagggaaggggctggagtgggtctcagttatttatagcggtggtagcacatactacgcagactccgtgaagggccgattcaccatctccagagacagttccaagaacacgctgtatcttcaaatgaacagcctgagagccgaggacacggccgtgtattactgtgcgagtcgaggaattaacggggggttcggggaagatgaggaatacttccaccactggggccagggcaccctggtcaccgtctcctctg

SEQ ID NO: 2908 - DNA, 364 bp, synthetic construct; identical to SEQ ID NO: 1765
  misc_feature 1..364: note = Synthetic construct
  source 1..364: mol_type = other DNA

SEQ ID NO: 2909 - DNA, 382 bp, synthetic construct
  misc_feature 1..382: note = Synthetic construct
  source 1..382: mol_type = other DNA
gaggtgcagctggtggaatctgggggaggcttggtccagcctggggggtccctgagactctcctgtgcagcctctggattcacctttagtacccattggatgagctgggtccgccaggctccagggaaggggctggagtgggtggccaacataaagcaagacggaagtgagaaatactatgtggactctgtgaagggccgattcaccatctccagagacaacgccaagaactcactgtatctgcaaatgaacagcctgagagccgaggacacggctgtgtatttctgtgcgagagatgggtcttgtgattacatttgggggggttatcgttatgatgcttttgatatttggggccaagggacaatggtcaccgtctcctcag

SEQ ID NO: 2910 - DNA, 373 bp, synthetic construct
  misc_feature 1..373: note = Synthetic construct
  source 1..373: mol_type = other DNA
gaggtgcagctggtggagtctgggggaggcttggtccagcccggggggtccctgagactctcttgtgcagcctctggattcacctttagtgactattggatgagctgggtccgccaggctccagggaaggggctggagtgggtggccaacataaagcaagatggcagtgagaaatacttggtggactctgtgaagggccgattcaccatctccagagacaacgccaagaactcactgtatctgcaaatgaacagcctgagagccgaggacacggctgtgtattactgtgcgagccatccttatgggaggtatagcagtggctggggggcctttgactactggggccagggaaccctggtcaccgtctcctcag

SEQ ID NO: 2911 - DNA, 381 bp, synthetic construct
  misc_feature 1..381: note = Synthetic construct
  source 1..381: mol_type = other DNA
gaggtgcagctggtggagtctgggggaggcttggtccagcctggggggtccctgagactctcctgtgcagcctctggattcacctttagtagctattggatgagctgggtccgccaggctccagggaaggggctggagtgggtggccaacataaagcaagatggaagtgagaaatactatgtggactctgtgaagggccgattcaccatctccagagacaacgccaagaactcactgtatctgcaaatgaacagcctgagagccgaggacacggctgtgtattactgtgcgagacagcgaagcgagtggatagtagtggttattacgggctactactacatggacgtctggggcaaagggaccacggtcaccgtctcctca

SEQ ID NO: 2912 - DNA, 388 bp, synthetic construct
  misc_feature 1..388: note = Synthetic construct
  source 1..388: mol_type = other DNA
gaggtgcagctggtggagtctgggggaggcttggtccagcctggggggtccctgagactctcctgtgcagcctctggattcacctttagtagctattggatgagctgggtccgccaggctccagggaaggggctggagtgggtggccaacataaagcaagatggaagtgagaaatactatgtggactctgtgaagggccgattcaccatctccagagacaacgccaagaactcactgtatctgcaaatgaacagcctgagagccgaggacacggctgtgtattactgtgcgagagatcgcggacaccccaattactatggttcggggagttattaccgctactactttgactactggggccagggaaccctggtcaccgtctcctcag

SEQ ID NO: 2913 - DNA, 355 bp, synthetic construct
  misc_feature 1..355: note = Synthetic construct
  source 1..355: mol_type = other DNA
gaggtgcagctggtggagtctgggggaggcttggtccagtctggggagtccctgagagtctcctgtgcagcctctggattcacctttagtttctattggatgagctgggtccgccaggctccagggaaggggctggagtgggtggccaacataaagaaagatggaagtgagaaattctatgtggactctgtgaagggccgattcaccatctccagagacaacgccaagaaatcactgtatctgcaaatgaacagcctgagagccgaggacacggctgtgtattattgtgcgcgacggtcgtatagtggctactttgactcctggggccagggaaccctggtcaccgtctcctcag

SEQ ID NO: 2914 - DNA, 346 bp, synthetic construct
  misc_feature 1..346: note = Synthetic construct
  source 1..346: mol_type = other DNA
gagttgcgactggtggagtctgggggaggccgggtccagccgggggggtccctgagactctcctgtgcagcctctggactcccccttggttggatgagctgggtccgccaggctccagggaaggggctggagtgggtggccttcataagcgacgacggatttcaaaaagcatatgtggactcgctgaagggccgattcatcatctccagagacaacgcccagaactcactgtttctgcaaatgaacagcctgacagtcgaggacacggctgtctattactgtgcgaccctgaagtggaattccttagactcctgggggcagggagtcctggtcaccgtctcctcag

SEQ ID NO: 2915 - DNA, 379 bp, synthetic construct
  misc_feature 1..379: note = Synthetic construct
  source 1..379: mol_type = other DNA
gaggtgcagctggtggagtctgggggaggcttggtaaagcctggggggtcccttagactctcctgtgcagcctctggattcactttcagtaacgcctggatgagctgggtccgccaggctccagggaaggggctggagtgggttggccgtattaaaagcaaaactgatggtgggacaacagactacgctgcacccgtgaaaggcagattcaccatctcaagagatgattcaaaaaacacgctgtatctgcaaatgaacagcctgaaaaccgaggacacagccgtgtattactgtaccacagggttcgattttggagtggttattattgtcgatggcatggacgtctggggcaaagggaccacggtcaccgtctcctcag

SEQ ID NO: 2916 - DNA, 390 bp, synthetic construct
  misc_feature 1..390: note = Synthetic construct
  source 1..390: mol_type = other DNA
gaggtgcagctggtggagtctgggggaggcttggtaaagcctggggggtcccttagactctcctgtgcagcctctggattcactttcagtaacgcctggatgagctgggtccgccaggctccagggaaggggctggagtgggttggccgtattaaaagcaaaactgatggtgggacaacagactacgctgcacccgtgaaaggcagattcaccatctcaagagatgattcaaaaaacacgctgtatctgcaaatgaacagcctgaaaaccgaggacacagccgtgtattactgtaccacagtcccttattgtagtggtggtagctgctacggggactactactactacatggacgtctggggcaaagggaccacggtcaccgtctcctca

SEQ ID NO: 2917 - DNA, 382 bp, synthetic construct
  misc_feature 1..382: note = Synthetic construct
  source 1..382: mol_type = other DNA
gaggtgcagctggtggagtctgggggaggcttggtaaagcctggggggtcccttagactctcctgtgcagcctctggattcactttcagtaacgcctggatgagctgggtccgccaggctccagggaaggggctggagtgggttggccgtattaaaagcaaaactgatggtgggacaacagactacgctgcacccgtgaaaggcagattcaccatctcaagagatgattcaaaaaacacgctgtatctgcaaatgaacagcctgaaaaccgaggacacagccgtgtattactgtaccacctcaatcgaattactatggttcggggagcccctcggcgcttttgatatctggggccaagggacaatggtcaccgtctcttcag

SEQ ID NO: 2918 - DNA, 372 bp, synthetic construct
  misc_feature 1..372: note = Synthetic construct
  source 1..372: mol_type = other DNA
gaggtgcagctggtggagtctgggggaggcttggtaaagcctggggggtcccttagactctcctgtgcagcctctggattcactttcagtaaggcctggatgagctgggtccgccaggctccagggaaggggctggagtgggttggccgtattacaaccaattctgatggtgggacaacagactacgctgcacccgtgaacggcagattcatcatctcaagagaagattcaaaaaacacactgtatctgcaaatgaacagcctgaaaaccgaggacacagccgtgtattactgtaccactttacggtcaggggactactacttctactacatggacgtctggggcaaagggaccacggtcaccgtctcctca

SEQ ID NO: 2919 - DNA, 370 bp, synthetic construct
  misc_feature 1..370: note = Synthetic construct
  source 1..370: mol_type = other DNA
gaggtgcagctggtggagtttgggggaggcttggtaaagcctggggggtcccttagactctcctgtgcagcctctggattcactttcagtaacgcctggatgagctgggtccgccaggctccagggaaggggctggagtgggttggccgtattaaaagcaaaactgatgatgggacaacagactacgctgcacccgtgaaaggcagattcaccatctcaagagatgattcaaaaaactcgctgtatctgcaaatgaacagcctgaaaaccgaggactcagccgtgtattactgtaccacagagggcggcagtggctggtttgggtactttgactactggggccagggaaccctggtcaccgtctcctcag

SEQ ID NO: 2920 - DNA, 352 bp, synthetic construct
  misc_feature 1..352: note = Synthetic construct
  source 1..352: mol_type = other DNA
gaggtgcaactggtggagtctgggggaggcttggtacagccagggcggtccctgagactctcctgtacagtctctggtttcaaattcggtgattatgctatgagctgggtccgccaggctccagggaagggtctggagtgggtaggtctcattagaagcaaagcttttggtgggaccacagaatacgccgcgtctgtgagaggcagattcaccatctcaagagatgatggcaaaagcatcgcctatctgcaaatgaacaacctgcgaaccgaggacacagccgtgtattactgtagtagagactggggcattgcactctggggccaagggacattggtcaccgtctcttcag

SEQ ID NO: 2921 - DNA, 382 bp, synthetic construct
  misc_feature 1..382: note = Synthetic construct
  source 1..382: mol_type = other DNA
gaggtgcagctgttggagtctgggggaggcttggtacagccgggggggtccctgagactctcctgttcagcctctggattcacctttagcacctatggcatgagctgggtccgccaggctccagggacggggctggagtgggtctcagctattagtggtagtggtgatagcacatactacgcagactccgtgaagggccggttcaccatctccagagacaattccaagtacacgctgtatctacaaatgaacagcctgagagccgaggacacggccgtatattactgtgcgaaagatgggggaagaacgtcttactatgatactagtgcttattactactttgactactggggccagggaaccctggtcaccgtctcctcag

SEQ ID NO: 2922 - DNA, 385 bp, synthetic construct
  misc_feature 1..385: note = Synthetic construct
  source 1..385: mol_type = other DNA
gaggtgcagctggtggagtctgggggaggcttggtccagcctggggggtccctgagactctcttgtgcagcctctggattcacctttagtagctattggatgagctgggtccgccaggctccaggtaaggggctggagtgggtggccaacataaagcaagatgggagtgacaaatactatgtggactctgtgaagggccgattcaccatctccagagacaacgccaagaactcactgtatctgcaaattaacagcctgagagccgaggacacggctgtgtattcctgtgcgagagaagatcgtggatattgtagtagtggtagctgctactttgtagggacctttgactactggggccagggaaccctggtcaccgtctcctcag

SEQ ID NO: 2923 - DNA, 349 bp, synthetic construct
  misc_feature 1..349: note = Synthetic construct
  source 1..349: mol_type = other DNA
gaggtgcagttggtggagtctgggggagacttggtccagcctggggggtccctgagactctcctgtgcagcctccggattccactttagtagttattggatgagctgggtccgcctgactccagggaagtggctggagtgggtggccaccataaaccaagatggaagtgagcgaatctatgtggactctgtgaagggccggttcaccatctccagagacaacgccaagaactctctgtttctgcaaatggacagcctgagaggcgaagacactggtctttattactgtgcgcgagggtcccgggaggttctctactggggccagggagccctggtcaccgtctcctcag

SEQ ID NO: 2924 - DNA, 373 bp, synthetic construct
  misc_feature 1..373: note = Synthetic construct
  source 1..373: mol_type = other DNA
gaggtgcagttggtggagaccggaggagagttgatccagcctggggggtccctgagactctcctgtgcggcctctgggctcaccgtcaccagaacctacatgagctgggtccgcctggctccagggaagggcctggagtgggtctcagttatctatatcggtgatagagcatactacgcagagtccgtgaagggccgattcaccatctctcgagacaattccaagaacactttgtatcttcaaatgaacagcctgagagtcgacgacacggccgtctattactgtgcgagaggaggggcccattattgtggtggtgactgcccgagggcttttgacatctggggccaggggacaatggtcatcgtctcttcag

SEQ ID NO: 2925 - DNA, 355 bp, synthetic construct
  misc_feature 1..355: note = Synthetic construct
  source 1..355: mol_type = other DNA
gaggtgaagttggcggagtctgggggaggcttggtccagcccggggggtccctgacactctcctgtgtagtctctggtttcacatttgggcactattggatgagctgggtccggcaggctccagggaagggactggagtgggtggccaacatcaagttcgatggaagtgaaaaaaattatgtggactctgtgaagggccgattcaccatctccagagacaacgcccagaattcagtgtttctgcaaatgaggcgcctgagagtcgaggacacggctgtctactattgtgcgagtctctggtcccgttactactttgacttctggggccagggagccctggtcaccgtctcctcac

SEQ ID NO: 2926 - DNA, 364 bp, synthetic construct
  misc_feature 1..364: note = Synthetic construct
  source 1..364: mol_type = other DNA
caggtgcagctggtggaatctgggggaggcttggtcaagcctggagggtccctgagactctcctgtgcagcctctggattcaccttcagtgattactacatgagttggatccgccaggctccagggaaggggctggagtgggtttcagatgttagtagtggtggcagtacaaaatactacgcagactctgtgaggggccgattcaccgtgtccagggaccaggccaaaaactcactgtttttgcaaatgaacagtctgagagtcgaggacacggctgtatattactgtgcgagagcgacgggtgggaccttctactaccatatggacgtctggggcaaagggaccacggtcaccgtctcctcag

SEQ ID NO: 2927 - DNA, 402 bp, synthetic construct
  misc_feature 1..402: note = Synthetic construct
  source 1..402: mol_type = other DNA
gaggtacaactagtggagtctgggggacgtgtggtacggccgggggagtccctgagactctcctgtgcagtctctgggttcacttttgatgatcatgcaatgagttgggtccgccaagttccagggagggggctggagtgggtctctggcattaatggcgatggcacaagtgcaacttatgcagactctgtgaagggccgattcaccatcgccagggacaacgccaggaactccctctacctgcaaatgaatggtctgggacccgacgacacggccctttatttctgtgtaaaacaggctctgaatactgggtacgattcgactttttcaccctttgtctctatctactactacttctacatggacgtctggggccgagggaccaccgtcaccgtctcctca

SEQ ID NO: 2928 - DNA, 370 bp, synthetic construct
  misc_feature 1..370: note = Synthetic construct
  source 1..370: mol_type = other DNA
ggggtgcatctggtggagtctgggggaggcttggtccagcctggggggtccctgagactctcatgtgcagcctctggattcacctttagttcctactggatgagttgggtccgccaggctccaggcaaggggctggagtgggtggccaatataaaatatgatggcagtgagaaatacgggttgggctctgtggggggccgattcaccatctccagagacaacgccaagaactcactgtatctccaaatgaacagcctgagagccgaggacacggctgtgtattactgtgggagactctgccaggcgttttggtccggggaacattgtggggactcctggggccagggaaccctggtcaccgtctcctcag

SEQ ID NO: 2929 - DNA, 379 bp, synthetic construct
  misc_feature 1..379: note = Synthetic construct
  source 1..379: mol_type = other DNA
gaggtgcagttggtggagtcggggggagacttggtccaccctggagggtccctgagactctcctgtgaagcctctggattcaccttcagtagttctgagatgagttgggtccgccaggctccagggaaggggctagagtgggtttcatatatcactactcaaggctctaccatatcctacgcagagtctgtgaagggccgattcaccgtctccagagacaacgccaggaactcactgtatctgcacatgaatagcctgagagccgaggacacgggtgtttattattgtgcgacacacgtctcgctccattgtggttctaattgctattcggaatatttccatcactggggccagggcaccctggtcatcgtctcctcag

SEQ ID NO: 2930 - DNA, 361 bp, synthetic construct
  misc_feature 1..361: note = Synthetic construct
  source 1..361: mol_type = other DNA
gaggtgcagctggtggaatcggggggaggcttggtacagccagggcggtccctgagactctcctgttcagcttccggattcacctttggtgactacactatgagttgggtccgccaggctccagggaaggggctggagtgggtaggtttcattagaagcaaagcttatggtgggacaacagaatacgccgcgtctctgaaaggcagattcaccatctcaagagatgattccagaagcatcgcctatctgcaaatgaacagcctgaaaatcgaggacacagccgtgtattactgtatttcggctgctacggatgagctctttgagtactggggcccgggaaccctggtcaccgtctcctcag

SEQ ID NO: 2931 - DNA, 373 bp, synthetic construct
  misc_feature 1..373: note = Synthetic construct
  source 1..373: mol_type = other DNA
gaggtgcagctgttggagtctgggggaggcttggtacagcctggggggtccctgagactctcctgtgtagcctctggattcacctttaatatctttgccatgagttgggtccgccaggctccagggaaggggctggagtgggtctcaacgattagtggtagtggtgccccactctactcagactccgtgaagggccggttcaccatctccagagacaattccaaaaacacactgtatctgcaaatcaacagcctgagagccgaagacacggccatatatcactgttcaaagaatcagtttgatagtagtggttattacttaggaggggcttttgatatctggggccaagggacaacggtcaccgtctcttcag

SEQ ID NO: 2932 - DNA, 376 bp, synthetic construct
  misc_feature 1..376: note = Synthetic construct
  source 1..376: mol_type = other DNA
gaggtgcagttgttggagtctgggggaggcttggtacggcctggggggtccctgagactctcctgtgcagcctctggattcacctttagaatctttgccatgagttgggtccgccaggctccagggaaggggctggagtgggtctcagctgttagtgctagtggtggtaacacatactacgcagactccgtgaagggccgtttcaccatctccagagacaattccaagaacacggtgtatctggaaatgaacagcctgaaagccgaggacacggccgtatattactgtgcgaaaaccacgacgttttattatgataatagtgacctttttgcttttgatatctggggccaagggacaaaggtcaccgtctcttcag

SEQ ID NO: 2933 - DNA, 367 bp, synthetic construct
  misc_feature 1..367: note = Synthetic construct
  source 1..367: mol_type = other DNA
gaggtgcaactggtggagtctgggggaggcttggtccagcctggggggtccctgagactctcttgtgcagcctctggattcacctttagtagttattggatgagttgggtccgccaggctccagggaaggggctggagtgggtggccaatataaagcaagatggaagtgagaaaaactatgtggactctgtgaagggccgattcatcatctccagagacaatgccaagaactcagtgtatctgcaaatgaacagcctgagagtcgaggacacggctatctattattgtgcgagagaggcaggtggctggtcctctcacaactggttcgacccctggggccagggaaccctggccaccgtctcctcag

SEQ ID NO: 2934 - DNA, 355 bp, synthetic construct
  misc_feature 1..355: note = Synthetic construct
  source 1..355: mol_type = other DNA
gaggtgcagctggtggagtctgggggaggcttggtccagcctggggggtccctgagactctcctgtgcagcctctggattcacctttagtggctattggatgagttgggtccgccaggctccagggaaggggctggagtgggtggccaatataaagcaagatggaagtgagaaatactatgtggactctgtgaagggccgattcaccatctccagagacaacgccaagaactcactgtatctgcaaatgaacagcctgagagccgaggacacggctgtgtattactgtgcgagagaagggcattccgaaggttttgatatttggggccaagggacaaaggtcaccgtctcttcag

SEQ ID NO: 2935 - DNA, 391 bp, synthetic construct
  misc_feature 1..391: note = Synthetic construct
  source 1..391: mol_type = other DNA
gaggtgcaactggtggagtctgggggaggcttggtaaagcctggggggtcccttagactctcctgtgcagcctctgcattcactttcagtaaggcctggatgagttgggtccgccaggctccagggaaggggctggagtgggttggccgtattaaaagcaacactgatggtgagacaacagactacgctgcacccgtgaaaggcagattcaccatctcaagagatgattcaaaaaacacgctgtatctgcaaatgaacagcctgaaaaccgaggacacagccgtgtattactgtaccacaggactaggaagcgatgataatagtgattattttatgaacattgatggttttaatatctggggccaagggacaaaggtcaccgtctcttcag

SEQ ID NO: 2936 - DNA, 373 bp, synthetic construct
  misc_feature 1..373: note = Synthetic construct
  source 1..373: mol_type = other DNA
gaggtgcaactggtggagtctgggggaggcttggtccagccgggggggtccctgagactttcctgtgcagcctctggattcacttttagtagatattggatgagttgggtccgccaggctccggggaaggggctggagtgggtggccaacataagatttgatgcgactgacacgaattatgtggcctctgtggagggcagattcaccatctccagagacgacagcaagaggtctgtagatttgcagatggacaggctgacagccgaagacacggccatctatttctgtgcgagagtttttaggactggagactattggaggggacttctgtgggactactggggccagggagcccaggtcaccgtctcctcag

SEQ ID NO: 2937 - DNA, 403 bp, synthetic construct
  misc_feature 1..403: note = Synthetic construct
  source 1..403: mol_type = other DNA
gaggtggaactggtggagtctgggggaggcttggtccagcctggggggtccctaagactctcctgtgaagcctctggattcaccttcagtaattattggatgagttgggtccgccagtctccaggaaaggggctggagtgggtggccaacataaaaaaagatggaagtgagaaacattatgtcgactctgtgaagggtcgattcaccatctccagagacaacaccaacagttcattgtttctgcaaatgagtaggctgagagtcgaggacacggctgtttattactgcgcggctcatctgaggggggcgacagatggcggtttttggagtggccttgcgcgtttgaagtcctgggggtggctcgacccctggggccagggagcccaagtcaccgtctcctcag

SEQ ID NO: 2938 - DNA, 379 bp, synthetic construct
  misc_feature 1..379: note = Synthetic construct
  source 1..379: mol_type = other DNA
gaggtgaggctggtggagtctgggggaggcttggttagacctggggaatctctcagaataacatgtgcagcctctggattcattttcaaaaatgcctggatgagttgggtccgccagtctccagggagggggctggagtgggttggccgaattaagacgaaggaagatggtgggacaacagactacgccgcacccgtgagaggcagattcaccatttcaagacatgattcattagacacactgtctctacaaatgaacaacgtgacagccgacgacgcagccgtctattactgtaccacagattttcggttcgatgacagtggttactacaactacttagataactggggacagggaacccgcgtcaccgtctcctcag

SEQ ID NO: 2939 - DNA, 373 bp, synthetic construct
  misc_feature 1..373: note = Synthetic construct
  source 1..373: mol_type = other DNA
gaggtgatgttggtggagtctgggggaggcgtggtacagccgggggggtcattgagtcttacctgtgtggcctccggattcacttttaattcttattccatgagttgggtccggcaggctccaggaaagggactagagtgggtcgcatatattagcgccagcggcggtaccacatattatacagactccgtgaagggccgcttcaccatctccagagacagctccaagaacatccttcatctccaattggacagtctgaaagtcgaggactcggccctttattattgtgcgaaagagggtggacgtggatatagttccttcgataattactttgactattggggccagggagccctggtcaccgtcgcctcag

SEQ ID NO: 2940 - DNA, 352 bp, synthetic construct
  misc_feature 1..352: note = Synthetic construct
  source 1..352: mol_type = other DNA
caggtccagttggtgcagtctggggctgaggtgaagaagcctgggtcctcggtgaaggtctcctgtaagatttctggagacaccttctttaactatgttatgatatgggtgcgacaggcccctggagaagggcttgagtggatgggagggaccatccccatttctggcacagcaaagtatgcacagaagttccagggcagagtcacgatcaccacggacgaatccacaaggacagtctacatggaactgagtagcctgacatctgacgacacggccgtttattattgtgcgagaaatagtgcccagccctttgactcctggggccagggaaccctggtcaccgtctccacgg

SEQ ID NO: 2941 - DNA, 385 bp, synthetic construct
  misc_feature 1..385: note = Synthetic construct
  source 1..385: mol_type = other DNA
caggtgcagctggtggagtctgggggaggcttggtcaaacctggagggtccctgagactctcctgtgcagcctctggattcaccttcagtgactactacatgatctggatccgccaggctccagggaaggggctggagtggatttcattcattagtagcagtggtagtggcatatactacgcagactccgtgaagggccgattcaccgtctccagggacaacgccaagaagtcactgtatctgcaaatgaacagcctgagagccgaggacacggctgtgtattactgtgcgagagatatcgcccctcattactatgatagtagtgcttattcacccgatgcttttgatatctggggccaagggacaatggtcaccgtctcttcag

SEQ ID NO: 2942 - DNA, 364 bp, synthetic construct
  misc_feature 1..364: note = Synthetic construct
  source 1..364: mol_type = other DNA
gaggtgcagctggtggagtctgggggagacttggtacagcggggggggtccttgagactctcctgtgcagcctctggattcacctttaacaattatggcatgatctgggtccgccagcctccagggaaggggctggagtgggtctcatctatcagtagtggtggtggtaggacatactatgcagactccgtgaagggccggttcaccatctccagagacaattccaagaacacggtgtatctacaaatgaatagcctgagagtcgaggacacggccgtatattattgtgcgaaacggcaggggtatagtagctcgtccccgttggggtcctggggccagggaaccctggtcaccgtctcctcag

SEQ ID NO: 2943 - DNA, 364 bp, synthetic construct
  misc_feature 1..364: note = Synthetic construct
  source 1..364: mol_type = other DNA
gaggtgcagctggtggagtctgggggagacttggtacagcggggggggtccttgagactctcctgtgcagcctctggattcacctttaacaattatgccatgatctgggtccgccaggctccagggaaggggctggagtgggtctcatctatcagtagtggtggtggtaggacatactatgcagactccgtgaagggccggttcaccatctccagagacaattccaagaacatggtgtatctacaaatgaatagcctgagagtcgaggacacggccgtatattattgtgcgaaacgacaggggtatagtagctcgtccccgttggggtcctggggccagggaaccctggtcaccgtctcctcag

SEQ ID NO: 2944 - DNA, 373 bp, synthetic construct
  misc_feature 1..373: note = Synthetic construct
  source 1..373: mol_type = other DNA
gaggtgcagctggtggagtctgggggaggcttgatagagcctggagggtccctgagactctcttgtgtagcctctggatttaccttcagtctctatgaaatgatctgggtccgccaggctccagggaaggggctggagtgggttgcatatgtttctactaggggtgataccacatactatgctgactctctgaggggccgattcaccatctccagagacaactccaagaatttactctctctacaaatgaacagcctgcgagccgaggacacggctctttatttctgcgcgagagtcggctgtagtggtgatcattgctatggatattactttgactactggggacagggaaccctggtcgccgtctcctccg

SEQ ID NO: 2945 - DNA, 355 bp, synthetic construct
  misc_feature 1..355: note = Synthetic construct
  source 1..355: mol_type = other DNA
gaggtccagctgctacagtccggggctgaggtgaagaagcctggggccaccgtgaaaatctcctgcaaggcttctggatacaccttcaccgactactacatgcactggattcaacaggcccctggaaaagggcttgagtggttgggacgtgtggatcctgaagatggcaaaactgtttatgcagaccttttgtatggcagagtcaccatgaccgcggacgcgtcgacagacacagcctacctggagctgagcggcctgacatctgaagacacggccctttatttctgtgcaaccctctctgcccctgttatctcccgtcactggggccagggaacccaggtcaccgtctcctcgg

SEQ ID NO: 2946 - DNA, 367 bp, synthetic construct
  misc_feature 1..367: note = Synthetic construct
  source 1..367: mol_type = other DNA
caggaacaactggtggagtctgggggaggcgtggtgcagcctgggatgtccctgagactttcctgtgcagcctctggattcatcttcagtgactatggcatgcactgggcccgccaggctccagacaagggcctggagtgggtggcgattatttcacacgatggaaatagtaaatattatgcagactctgtgaagggccgactcaccatttccagagacaactccaagaaaacagtctttttgcaaatgaatagcctgagaaatgaggacacaggtatatattattgtgcgagagggcgcagtgactggttgactggaggaggttttgatatttggggccgggggacagtggtcaccgtctcctcag

SEQ ID NO: 2947 - DNA, 358 bp, synthetic construct
  misc_feature 1..358: note = Synthetic construct
  source 1..358: mol_type = other DNA
gaggtgcagctggtggagtccgggggaggcttagttcagcctggggggtccctgagactctcctgtgcagcctctggattcaccttcagttactactggatgcactgggtccgccaagctccagggaagggactggtgtgggtctcacgtattaatagtgatggaaataatacacgctacgcggactccgtgaagggccgattcaccatctccagagacaacgccaagaacacactgtatctgcaaatgaacagtctgagagccgaggacacggctgtatattactgtgcaagagaggactacggtggtaaaccccaggcctactggggccagggaaccctggtcaccgtctcctcag

SEQ ID NO: 2948 - DNA, 355 bp, synthetic construct
  misc_feature 1..355: note = Synthetic construct
  source 1..355: mol_type = other DNA
gaggtgcagctggtggagtctgggggcggcctggtcaagccgggggggtcccttagactctcctgtgcagtgtcagggttcaccttcagtgactacaccatgcactgggtccgccactctccagggaagggactggagtgggtctcatccattagtagtggtgatgtcttcatcaactacgcagactcagtgaagggccgattcagcacctccagagacaacgccaagaactccctatatctgcaaatgagtagcctgagagtcgaagacacggctgtctattactgtgcgagaggtttgtccgcagtggctggttcggggtggggccagggaaccctggtcaccgtctcctcag

SEQ ID NO: 2949 - DNA, 370 bp, synthetic construct
  misc_feature 1..370: note = Synthetic construct
  source 1..370: mol_type = other DNA
gaggtgaacctggtggagtctgggggaggcttggcccagccgggggggtccctgagactctcctgtgcagcctctggattcaccttcagtagctatgctatgcactgggtccgccagcctccagggaagggactgcaatttgtttcaagtattactaattctggggctggcacatattatgcagactccgtgaagggcagattcaccatctccagagacaacgccaggaacacggtgtatcttcagatgggcagcctgagacctgaggacacggctttatattactgtgcgcgagttcagcatgatagtagtggttattattctggccttgacttctggggccagggaaccctggtcaccgtctcctctg

SEQ ID NO: 2950 - DNA, 375 bp, synthetic construct
  misc_feature 1..375: note = Synthetic construct
  source 1..375: mol_type = other DNA
caggtgcagctggtggagtcggggggaggcgtggtccagcctgggaggtccctgagactctcctgtgcagcctctggattcaccttcagcgattatggcatgcactgggtccgccaggcgccaggcaaggggctggagtgggtggcaggtgtctcatatgatggagacaataaatactacgcagactccgtgaagggccgagttaccatctccagagacaattccgaggacaccctatatctccacatgaatagcctgagaatccaggacacggctgtttatcactgtgcgaggcgatacaccggtgcctggtcctacttcacgtaccactacttggacgtctggggcaaggggaccgcggtcacggtctcctca

SEQ ID NO: 2951 - DNA, 373 bp, synthetic construct
  misc_feature 1..373: note = Synthetic construct
  source 1..373: mol_type = other DNA
caggtgcagctggtggagtctgggggaggcgtggtccagcctgggaggtccctgagactctcctgtgcagcctctggattcaccttcagtagttatggcatgcactgggtccgccaggctccaggcaagggactggagtgggtggcagttatctcttatgatggaattaataaatactttgcagactccgtgaagggccgatgcaccatctccagagacaattccaagaacacgctgtatctgcaaatgaacagcctgagagctgaggacacggctgtgtattactgtgcgaaaccgcgggtgaactttggttcggggagaggagacgattttgatatctggggccaagggacaatggtcaccgtctcttcag

SEQ ID NO: 2952 - DNA, 282 bp, synthetic construct
  misc_feature 1..282: note = Synthetic construct
  source 1..282: mol_type = other DNA
gggggagttcggccatgcactgggtccgccaggctccaggcaagggcctggagtggctggcacttgtgtcatttgatggaaacaaaaaaaggtatgcagactccgtgaagggccgattcaccgtctccagagacaattccaagaacacgctgtttctgcaaatggacagcctgagaccggaggacacggctgtgtacttctgtgcgagaaattttggagtgattcttataggagatgcctttgatctctggggccaagggacaatggtcaccgtctcttcag

SEQ ID NO: 2953 - DNA, 379 bp, synthetic construct
  misc_feature 1..379: note = Synthetic construct
  source 1..379: mol_type = other DNA
caggtgaagctggtggagtctgggggaggcgtggtccagcctgggaggtccctgagactctcctgtgcagcctctggattcaccttcagcaaccatggcatgcactgggtccgccaggctccaggcaaggggctgcaatggctgggagttatatcatataatggaagcagacaatattacgcagactccgtgaggggccgattcaccatctccagagacaactccaagaacacattatttctgcaaatgatcaggctgagacttgaggacacctctgtttattattgtgtcagaggcgattcagttcacttcgataggaatgcatattatgggggatttgatgtctggggccaaggggcactggtcaccgtctcctcag

SEQ ID NO: 2954 - DNA, 370 bp, synthetic construct
  misc_feature 1..370: note = Synthetic construct
  source 1..370: mol_type = other DNA
caggtgcggatggtgcagccgggaggaggcgtggtccagcctggggggtccctgacactctcctgtgatgtctctgcattcaccttcaatgcctacggcatgcactgggtccgccaggctccaggcaaggggctggaatggctggcagttatatcaaatgatggaaccaaaacatactacgcagactccgtgaggggccgattcatcatttccagagacaattccaagaacacgctgtatctgcaaatgaacagcctgaaacctgaggacacggctgtgtattactgtgcgagagatccccctagtgagtgggaggtaacgttctactttgactactggggccagggaaccctggtcaccgtcacctcag

SEQ ID NO: 2955 - DNA, 375 bp, synthetic construct
  misc_feature 1..375: note = Synthetic construct
  source 1..375: mol_type = other DNA
caggtgcagctggtggagtctgggggaaccgtggtccagcctgggacatccctgagactctcctgtgcagcctctggattctccttcagtagttatggcatgcactgggtccgccaggctccaggcaaggggctggaatgggtggcagttatatcaaatgacagaaataagaactattacgcagactccgtgaagggccgattcaccatctccagagacaattccaagaacacgctgtatttgcaaatgaacagcctgagacctgacgacacggctgtgtattactgtgcgagagacggtgcgtccatttttatcgaagtaattaatttctacatggacgtctggggcaaagggaccacggtcaccgtctcctca

SEQ ID NO: 2956 - DNA, 367 bp, synthetic construct
  misc_feature 1..367: note = Synthetic construct
  source 1..367: mol_type = other DNA
caggtgcagctggtggagtctgggggaggcgtggtccagcctgggaggtccctgagactctcctgtgcagcctctggattcaccttcagtagctatggcatgcactgggtccgccaggctccaggcaaggggctggagtggctggcacttatatcatatgatggaacctataaatactacgcagactccgtgaagggccgattcaccatctccagagacgattccaagaacaccctgtatctgcaaatgaacagcctgagaactgaggacacggctgtgtattactgtgcgcgccggttttgtagtggtggtagctgctactctcttgaatattggggccagggaaccctggtcaccgtctcctcag

SEQ ID NO: 2957 - DNA, 367 bp, synthetic construct
  misc_feature 1..367: note = Synthetic construct
  source 1..367: mol_type = other DNA
caggtgcagttggtggagtctgggggaggcgtggtccagcctgggaggtccctgcgactctcctgtgcagcgtctggattcaccttcagcacctatgccatgcactgggtccgccaggctccaggcaaggggctggagtggctggcagtcctttggtatgatggaagtaataaacagtatggagagaccgttaagggccgattcaccatctccagagacaatcccaagaacacactatatctgcaaatgaacagcctgagagtcgacgacacggctgtatattattgtgtgaaggattcgggttcggggaggatcatttccctgcttgacttctggggccagggaaccgtggtcaccgtctcttcag

SEQ ID NO: 2958 - DNA, 364 bp, synthetic construct
  misc_feature 1..364: note = Synthetic construct
  source 1..364: mol_type = other DNA
caggtgcagctggtggagtctgggggaggcgtggtccagcctgggaggtccctgagactctcctgtgcagcctctggattcgtcttcagtagttatggcatgcactgggtccgccaggctccaggcaaggggctggagtggctggcagttatatcatttgatggaaacactgagcgctacgcagactccgtgaagggccgattcaccatctccagagacaactccaagaacacgctgtctctgcagatgaacagcctgagagctgacgactcggctgtatatttctgtgcgagaggtcccggatacagctatgacatccagtttgactactggggccagggaaccctggtcaccgtctcctcag

SEQ ID NO: 2959 - DNA, 364 bp, synthetic construct
  misc_feature 1..364: note = Synthetic construct
  source 1..364: mol_type = other DNA
caggtgcacctggtggagtctgggggaggcgtggtccagcctgggaggtccctgagactctcctgtgcagcctcgggattcaccttcagtagttatggcatgcactgggtccgccaggctccaggcaaggggctggagtgggtgacagttatctcatatgatgcaagtactgaattctacgcagactccgtgaagggccgattcatcatctccagagacaactccaagaacacgctgtatctggaaatgaacagcctgagagctgaggacacggctgtgtattactgtgcgagaagtcacggagatggctacaattcttactttgactactggggccggggaaccctggtcaccgtctcctcag

SEQ ID NO: 2960 - DNA, 361 bp, synthetic construct
  misc_feature 1..361: note = Synthetic construct
  source 1..361: mol_type = other DNA
caggtgcagttggtggagtctgggggaggcgtggtccagcctgggaggtccctgagactctcctgtgcagcctctggattcaccttcagtagctatggcatgcactgggtccgccaggctccaggcaaggggctggagtgggtgacatttatatcatatgatggaagtaataaatactatgcagactccgtgaagggccgattcaccatctccagagacaattccaagaacacgctgtatctgcaaatgaatagcctgagagctgaggacacggctgtgtatttctgtgcgaaagactattatggttcggggagttattgcgactactggggccagggaaccctggtcaccgtctcctcag

SEQ ID NO: 2961 - DNA, 388 bp, synthetic construct
  misc_feature 1..388: note = Synthetic construct
  source 1..388: mol_type = other DNA
caggtgcaactgatggagtctgggggaggcgtggtccagcctgggaggtccctgagactctcctgtgcagcctctggattcagtttcagtaactatggcatgcactgggtccgccaggctccaggcaaggggctggagtgggtggcaattatatcaaatgatgacagcatcaaatactacggagactccgtggagggccgattcaccatctccagagacaattccaagaatatgttgtatctgcaaatgaacagcctgagagctgaggacacggctgtgtatttctgtgcgagagccaacacctattactttacctcggggacttattataacaatgacgactaccttgactcctggggccagggaaccctggtcaccgtctcctcag

SEQ ID NO: 2962 - DNA, 364 bp, synthetic construct
  misc_feature 1..364: note = Synthetic construct
  source 1..364: mol_type = other DNA
caggtgcggctggtggagtctgggggaggcgtggtccagcctgggaggtccctgagactctcctgtgcagcctctggattcaatttcacttcctatgccatgcactgggtccgccaggctccaggcaaggggctggagtgggtggcaattatatcctatgatgggggcaataaatattacgcagactccgtgaagggccgattcaccatctccagagacaattccaagagcacactgtatctgcaaatgaacagcctgagaactgaagacacggctatatattactgtggaagagattttgggagatggccgcccaggggacttgactactggggccagggaaccctggtccccgtctcctcag

SEQ ID NO: 2963 - DNA, 361 bp, synthetic construct
  misc_feature 1..361: note = Synthetic construct
  source 1..361: mol_type = other DNA
caggtgcagttggtggagtctgggggaggcgtgctccagtctgggaggtccctgagactctcctgtgcagcctctggattcagcttcagaagctatggcatgcactgggtccgccaggctccaggcaaggggctggagtgggtggcacaaatttcaaatgatggaagtaatgaatactatacagactccgtgaagggccgattcaccatctccagagacaattccaagaacacgctgtatctacaaatgaacagcctgagaactgcggacacggccgtgtattactgtgcgaaagacatgtttgatattagtggtctcaatgactactggggccagggaaccgtggtcaccgtctcctcag

SEQ ID NO: 2964 - DNA, 364 bp, synthetic construct
  misc_feature 1..364: note = Synthetic construct
  source 1..364: mol_type = other DNA
caggtgcagctggtggagtctgggggaggcgtggtccagcctgggaggtccctgagactctcctgtgcagcctctggattcaccttcagttgctatggcatgcactgggtccgccaggctccaggcaaggggctggagtgggtggcagtaatatggtatgatggcactaagaaatactatgcagactccgtgaggggccgattcagcatctccagagacaattccaaaaacacactgtatctccaaatgaacagcctgagagctgaggacacggctgtatattactgtgcgaaagatcgggatgactacggtgactactactttgactactggggccagggaaccctggtcaccgtctcctcag

SEQ ID NO: 2965 - DNA, 286 bp, synthetic construct
  misc_feature 1..286: note = Synthetic construct
  source 1..286: mol_type = other DNA
accttcagtaactatggcatgcactgggtccgccaggctccaggcaaggggctggagtgggtggcagttatatcatatgatggaagcaataaatactacgcagactccgtgaagggccgattcaccatctccagagacaattccaagaacacactatatatgcaaatgaacagcctgagagctgaggacacggctgtctattactgtgcgagagcccaaacccattactatgatagtagagggtttggcgactggggccagggaaccctggtcaccgtctcctcag

SEQ ID NO: 2966 - DNA, 364 bp, synthetic construct
  misc_feature 1..364: note = Synthetic construct
  source 1..364: mol_type = other DNA
caggtgcagctggtggagtctgggggaggcgtggtccagcctgaaaagtccctgagactctcgtgtgcaacgtctggattcaccttcagtagttatggcatgcactgggtccgccaggctccaggcaaggggctggagtgggtggcagttacatcagatgatggaagcagtaaatactacgcagaatccgtgaagggccgattcaccatctccagagacaattccaagaacactctctatctgcaaatgaacagcgtgaggcctgacgacacggctgtgtattactgtgcgagagatcggtttgtagaggctacgaccacggcggacttctggggccagggaaccctggtcaccgtctcctcag

SEQ ID NO: 2967 - DNA, 381 bp, synthetic construct
  misc_feature 1..381: note = Synthetic construct
  source 1..381: mol_type = other DNA
caggtgcagctggtggagtctgggggaggcgtggtccagcctgggaggtccctgagactctcctgtgcagcctctggattcaccttcagtagctatggcatgcactgggtccgccaggctccaggcaaggggctggagtgggtggcagttatatcatatgatggaagcaataaatactacgcagactccgtgaagggccgattcaccatctccagagacaattccaagaacacgctgtatctgcaaatgaacagcctgagagctgaggacacggctgtgtattactatgcgagagtggagaggacaccctcatccggggcactctactactactactacatggacgtctggggcaaagggaccacggtcaccgtctcctca

SEQ ID NO: 2968 - DNA, 378 bp, synthetic construct
  misc_feature 1..378: note = Synthetic construct
  source 1..378: mol_type = other DNA
caggtgcagctggtggagtctgggggaggcgtggtccagcctgggaggtccctgagactctcctgtgcagcctctggattcaccttcaatagctatggcatgcactgggtccgccaggctccaggcaaggggctggagtgggtggcagttatatggtatgatggaagtaatgaatactatgcagactccgtgaagggccgattcaccatctccagagacaattccaagaacacactgtatctgcaaatgaacagcctgagagctgaggacacggctgtgtattactgtgcgaaagagggtggatatagtggctacggttactactactactactacatggacgtctggggcaaagggaccacggtcaccgtctcctca

SEQ ID NO: 2969 - DNA, 364 bp, synthetic construct
  misc_feature 1..364: note = Synthetic construct
  source 1..364: mol_type = other DNA
caggtgcagctggtggagtctgggggaggcgtggtccagcctgggaggtccctgagactctcctgtgcagcctctggattcaccttcagtagctatggcatgcactgggtccgccaggctccaggcaaggggctggagtgggtggcagttatatggtatgatggaagtaataaatactatgcagactccgtgaagggccgattcaccatttccagagacaattccaagaacacgctgtatctgcaaatgaacagcctgagagctgaggacacggctgtgtattactgtgcgaaagatccgaactcgggcagcagtggccaccttgactactggggccagggaaccctggtcaccgtctcctcag

SEQ ID NO: 2970 - DNA, 366 bp, synthetic construct
  misc_feature 1..366: note = Synthetic construct
  source 1..366: mol_type = other DNA
caggtgcagctggtggagtctgggggaggcgtggtccagcctgggaggtccctgagactctcctgtgcagcctctggattcaccttcagtagctatggcatgcactgggtccgccaggctccaggcaaggggctggagtgggtggcagttatatggtatgatggaagtaataaatactatgcagactccgtgaagggccgattcaccatctccagagacaattccaagaacacgctgtatctgcaaatgaacagcctgagagctgaggacacggctgtgtattactgtgcgaaagatgtggttcggggagttgactactactacatggacgtctggggcaaagggaccacggtcaccgtctcctca

SEQ ID NO: 2971 - DNA, 382 bp, synthetic construct
  misc_feature 1..382: note = Synthetic construct
  source 1..382: mol_type = other DNA
caggtgcagctggtggagtctgggggaggcgtggtccagcctgggaggtccctgagactctcctgtgcagcctctggattcaccttcagcaactatggcatgcactgggtccgccaggctccaggcaaggggctggagtgggtggcagttatatcatatgatggaagcaataaatactacgcagactccgtgaagggccgattcaccatctccagagacacttccaacaacacgctgtatctgcaaatgaacagcctgagagctgaggacacggctgtgtattactgtgcgagagatcggagtagttactatgatagtagtggttattacctaaactggttcgacccctggggccagggaaccctggtcaccgtctcctcag

SEQ ID NO: 2972 - DNA, 375 bp, synthetic construct
  misc_feature 1..375: note = Synthetic construct
  source 1..375: mol_type = other DNA
caggtgcagctggtggagtctgggggaggcgtggtccagcctgggaggtccctgagactctcctgtgcagcctctggattcaccttcagtagctatggcatgcactgggtccgccaggctccaggcaaggggctggagtgggtggcagttatatcatatgatggaagcaataaatactacgcagactccgtgaagggccgattcaccatctccagagacaattccaagaacacgctgtatctgcaaatgaacagcctgagagctgaggacacggctgtgtattactgtgcgagagattactgtagtagtaccagctgccctttctactactacatggacgtctggggcaaagggaccacggtcaccgtctcctca

SEQ ID NO: 2973 - DNA, 382 bp, synthetic construct
  misc_feature 1..382: note = Synthetic construct
  source 1..382: mol_type = other DNA
caggtgcagctggtggagtctgggggaggcgtggtccagcctgggaggtccctgagactctcctgtgcagcctctggattcaccttcagtagctatggcatgcactgggtccgccaggctccaggcaaggggctggagtgggtggcagttatatcatatgatggaagcaataaatattatgcagactccgtgaagggccgattcaccatctccagagacaattccaagaacacgctgtatctgcaaatgaacagcctgagagctgaggacacggctgtgtataactgtgcgagagctcacggcgaaggatattgtactaatggtgtatgttcctcctactttgactactggggccagggaaccctggtcaccgtctcctcag

SEQ ID NO: 2974 - DNA, 355 bp, synthetic construct
  misc_feature 1..355: note = Synthetic construct
  source 1..355: mol_type = other DNA
caggtgcagctggtggagtctgggggaggcgtggtccagcctgggaggtccctgagactctcctgtgcagcgtctggattcaccttcagtagctatggcatgcactgggtccgccaggctccaggcaaggggctggagtgggtggcagttatatggtatgatggaagtaataaatactatgcagactccgtgaagggccgattcaccatctccagagacaattccaagaacacgctgtatctgcaaatgaacagcctgagagccgaggacacggctgtgtattactgtgcgaaagacgccaatggtggctggtatgactactggggccagggaaccctggtcaccgtctcctcag

SEQ ID NO: 2975 - DNA, 358 bp, synthetic construct
  misc_feature 1..358: note = Synthetic construct
  source 1..358: mol_type = other DNA
ctggcgcagttggtggagtctgggggaggcgcggtcgagcctgggaagtcactaagactgtcctgtgcagcgtctggactcgccttcagaaattatgtcatgcactgggtccgccaggctccaggcaaggggctggagtgggtggcatatatatggaatgacggacagaagtcaaactacagagactccgtgaagggccgcttcaccgtttccagagacaattctaaggaaatgttgtttttacagatggattctatcagagccgacgacacggctatatattattgtgcgttctttccctcgggcagttatgcctttcacatttggggccgagggacagtggtcaccgtctccccag

SEQ ID NO: 2976 - DNA, 379 bp, synthetic construct
  misc_feature 1..379: note = Synthetic construct
  source 1..379: mol_type = other DNA
caggtgcagctggtggagtctgggggaggcgtggtccagcctgggaggtccctgagactctcctgtgcagcctctggattcgccttcagtagctttggcatgcactgggtccgccaggctccaggcaaggggctggagtgggtggcatttatatcaaatgatggaagcaataaatactacgcagactccgtgaagggccgattcaccatctccagagacaactccaagaacacgctgtatctgcagatgaacagcctgagagctgaggacacggctgtcttttactgtgcaagggatcagtattactctgaaactactgcttattacttcaaatacttccaacactggggccagggcaccctggtcaccgtcacctccg

SEQ ID NO: 2977 - DNA, 378 bp, synthetic construct
  misc_feature 1..378: note = Synthetic construct
  source 1..378: mol_type = other DNA
caggtgcaactggtggagtctgggggaggcgtggtccagcctgggaggtccctgagactctcctgtgcagcctctggattcctgttcagtagctatgccatgcactgggtccgccaggctccaggcaaggggctggagtgggtggccgttatatggtatgatggaagtaatcaacattatgcagactccgttaagggccgattcaccatctccagagacaattccgagaacacggtgtatctgcaaatgaacagcctgagagctgaggacacgggtgtatatttctgtgcgaaagtcggttatggtatcagttggtacttgggctactactactacatggacgactggggcaaggggaccacggtcaccgtctcctca

SEQ ID NO: 2978 - DNA, 378 bp, synthetic construct
  misc_feature 1..378: note = Synthetic construct
  source 1..378: mol_type = other DNA
caggtgcaggtggtggagtctgggggaggcgtggtccagcctggggggtccctgagactctcctgtgaagcctctggattcaccttcgacagttatggcatgcactgggtccgccaggctccaggcaaggggctggagtgggtggcttttatatcacatgatggaaacaagaaattctatgcagactccgttaagggccgattcaccatctccagagacaattccaagaccacaatatatctacaaatcaacagcctgagtgccgaggacacggctatgttttactgtgcgagagctttcgggaatttttttgattggtcctcccgggactattacatggacgtctggggcgaagggaccgcggtcaccgtctcctca

SEQ ID NO: 2979 - DNA, 361 bp, synthetic construct
  misc_feature 1..361: note = Synthetic construct
  source 1..361: mol_type = other DNA
caggtgcggcttttggagtctgggggaggcgtggtccagcctgggaagtccctgagactctcctgtgcagcctctggattcaccttcaccacctatgccatgcactgggtccgccaggctccaggcaaggggctggagtgggtgggagttgtatcacttgatggagacaaagaatactacgcagactccgtgaagggtcgatttacaatctctagagacaatttcaagaacacggtgtttctggaaatgaacaacctgagacctgaggaccaggctgtctattattgtgcgcgagggggggcctacgaaatgacctggtttgacacctggggccagggagccctggtcaccgtctcctcag

SEQ ID NO: 2980 - DNA, 375 bp, synthetic construct
  misc_feature 1..375: note = Synthetic construct
  source 1..375: mol_type = other DNA
cagggacaactggtggagtctgggggaggcatggtccagcctggggggtccctgagactctcctgtgcagcctctggattcaccttcagtaactatgacatgcactgggtccgccaggctccaggcaaggggctggagtgggtgtcaattatatcatatgatggaaacaatgaaaactatgcagactccgtgaagggccgattcaccatctccagagacatttccgggaatacactgtatctgcaaatgaacagtctgagagttgaggacacggctgtttattactgtgcgcgagatcatatggtgtctgcttcctcctacaactccttctacatggacgtctggggcaaagggacgacggtcaccgtctcctca

SEQ ID NO: 2981 - DNA, 364 bp, synthetic construct
  misc_feature 1..364: note = Synthetic construct
  source 1..364: mol_type = other DNA
caggtgcagctgctcgaatctgggggagccgtggtccagcctgggaggtccctgagactctcctgtgcagcctttggattccccctcagcaactacggcatgcactgggtccgccaggctccaggcaaggggctggagtgggtgtcatgtatatcagatgatggacaccataaatactacgcagattccgtgaagggccgattcaccatatccagagacaactctaaaaatacgatgtctctgcaaatgaacagtctgagaagtgaagatacggctttgtatttttgtgcgagcatgaccatggttcggacgaataactggttcgacctctggggccacggaaccctggtcaccgtctccgcag

SEQ ID NO: 2982 - DNA, 370 bp, synthetic construct
  misc_feature 1..370: note = Synthetic construct
  source 1..370: mol_type = other DNA
caggtgcagttggtggagtctgggggaggcgtggtccagcctgggaggtccctgaggctcccctgtgcagcctctgggttcaccttcagtaaccatggcatgcactgggtccgccaggctccaggcaaggggctggagtggttatcacttatatcatatgatggaagccatgattactacgcagactccgtgaagggccgattcaccatctccagagacaattccaagaacacgttgtatctgcaaatgaacaacctgagagctgaggacacggctgtatattattgtgcgacagataggcattcctatcattcggggagttttgttcttgacttctggggccagggaaccctggtcaccgtctcctcag

SEQ ID NO: 2983 - DNA, 364 bp, synthetic construct
  misc_feature 1..364: note = Synthetic construct
  source 1..364: mol_type = other DNA
caggtgcacctggtggagtccgggggaggcgtggtccagcctggggggtccctgagactctcctgtgtagcctctggtttcacctttggcgcctatgacatgcactgggtccgccaggctccaggcaggggtctggagtgggtggcaggtgtgtcatatgacgagagacagaaatcctttgcagactccgtgatggggcgatgcatcatctctagagacaattccgagaacaccctttttctgcaaatgcacagtctgagagttgaagatacggctctgtattactgcgcgaaaaagtttggccgcggactgtctgatgtttttgatatgtggggccaagggacaatggtcaccgtctcctcag

SEQ ID NO: 2984 - DNA, 349 bp, synthetic construct
  misc_feature 1..349: note = Synthetic construct
  source 1..349: mol_type = other DNA
caggtgcagctggtggagtctgggggaggcgtggtccagcctgggaagtccctgagactctcctgtgcagcctctggattcaccttcagtaactatggcatgcactgggtccgccaggctccaggcgaggggctggagtgggtggcgtttatctcatatcatggaagtgataaacgttctgcagactccgtgaagggccgattcaccatttccagagacaattccaagaacacgctgtatctgcaaatgaacaacctgagacctgaagacacggctgtctattattgtgcgctatattggaattatgtcctcgagtggggccagggaaccctggtctccgtctcctcag

SEQ ID NO: 2985 - DNA, 373 bp, synthetic construct
  misc_feature 1..373: note = Synthetic construct
  source 1..373: mol_type = other DNA
gaggtgcagctggtggagtccgggggaggcttggtccagcctggggggtccctgaaactctcctgtgcagcctctgggttcagcttcagtggctctgctatgcactgggtccgccaggcttccgggaaagggctggagtgggttggccgtattagaagcaaagctaacagttacgcgacagcatatgctgcgtcggtgaaaggcaggttcaccatctccagagatgattcaaagaacacggcgtatctgcaaatgaacagcctgaaaaccgaggacacggccgtgtattactgtactagacatctggatttcaatagtgacccgtcggggggggactactggggccagggaaccctggtcaccgtctcctcag

SEQ ID NO: 2986 - DNA, 367 bp, synthetic construct
  misc_feature 1..367: note = Synthetic construct
  source 1..367: mol_type = other DNA
gaagtgcagctggtggagtctgggggaggcttggtacagcctggcaggtccctgagactctcctgtgcagcctctggattcacctttgatgattatggcatgcactgggtccggcaaactccagggaagggcctggagtgggtcgcaggtattagttggaatagtgttaccataggctatgcggactctgtgaagggccgattcatcatctccagagacaacgccaagaactccctatatctgcaaatgaacagtctgagagctgaggacatggccgtgtattactgtgcaaaatccccctcccctgaggtgggaactacaccctttgactactggggccagggaaccctggtcaccgtctcctcag

SEQ ID NO: 2987 - DNA, 367 bp, synthetic construct
  misc_feature 1..367: note = Synthetic construct
  source 1..367: mol_type = other DNA
gaagtgcagctggtggagtctgggggaggcttggtacagcctggcaggtccctgagactctcctgtgcagcctctggattcacctttgttgattttgccatgcactgggtccggcaagctccagggaaaggcctggagtgggtctcaggtattacttggaatagtggtagcacaggctatgcggactctgtgaagggccgcttcaccatctccagagacaacaccaagaactccctgtatctggaaatgaacagtctcagagttgaggacacggccttgtattactgtgcaaaggacctagcagcagctggcacttatgatgcttttgaaaaatggggccaagggacaatggtcaccgtctcttcac

SEQ ID NO: 2988 - DNA, 364 bp, synthetic construct
  misc_feature 1..364: note = Synthetic construct
  source 1..364: mol_type = other DNA
gaagtgcagctggtggagtctgggggaggcttggtacagcctggcaggtccctgagactctcctgtgtagcctctggattcagtcttgatgattatgccatgcactgggtccggcaagctccagggaagggcctggagtgggtctcaggcattagttggaatagtggtagcgtagcctatgcggactctgtgaagggccgattcaccatctccagagaaaacgccaggaactccctgtatctgcaaatggacagtctgcgacctgaggacatggccttgtactactgtgtaaaagatctcgcgagcggtatggttcagggttttgatatctggggccaagggacaatggtcaccgtctcttcag

SEQ ID NO: 2989 - DNA, 376 bp, synthetic construct
  misc_feature 1..376: note = Synthetic construct
  source 1..376: mol_type = other DNA
gaagtgcagctggtggagtctgggggaggctgggtacagcctggcaggtccctgagactctcctgtgcagcctctggattcacctttgatgattatgccatgcactgggtccggcaagctccagggaagggcctggagtgggtctcaggtattagttggaatagtggtagcgtaggctatgcggactctgtgaacggccgattcaccatctccagagacaacgccaagaactccctgtatctgcaaatgaacagtctgagagctgaggacatggccttgtattactgtgcaaaagattcccacccttcttatggttcggggagttgggatgcttttgatatctggggccaagggacaatggtcaccgtctcttcag

SEQ ID NO: 2990 - DNA, 373 bp, synthetic construct
  misc_feature 1..373: note = Synthetic construct
  source 1..373: mol_type = other DNA
gaagtgcagctggtggagtctgggggaggcttggtacagcctggcaggtccctgagactctcctgtgcagcctctggattcacctttgatgattatgccatgcactgggtccggcaagctccagggaagggcctggagtgggtctcaggtattagttggaatagtagaagcatagcctatgcggactctgtgaagggccgattcaccatctccagagacagcgccaagaactccctgtctctgcaaatgaacagtctgagagctgaggacatggccttgtattactgtgcaagagatataaacccctatagcagtggctgggtgtcctactttgactactggggccagggaaccctggtcaccgtctcctcag

SEQ ID NO: 2991 - DNA, 379 bp, synthetic construct
  misc_feature 1..379: note = Synthetic construct
  source 1..379: mol_type = other DNA
gaagtgcagctggtggagtctgggggaggcttggtacatcctggcaggtccctgagactctcctgtgcagcctctggattcatctttgatgattatgccatgcactgggtccggcaagttccagggaagggcctggagtgggtctcaggtattagttggaatagtggtagcatagcctatgcggactctgtggagggccgattcaccatctccagagacaacgccaagaactccctgtatctgcaaatgaacagtctgagagctgaggacatggccttgtattactgtgcaaaggataggggattacgtttgggggagttatcgcggggtcactactttgacttgtggggccagggaaccctggtcaccgtctcctcag

SEQ ID NO: 2992 - DNA, 361 bp, synthetic construct
  misc_feature 1..361: note = Synthetic construct
  source 1..361: mol_type = other DNA
gaggtgcacctggtggagtctgggggagtcgtggttcagcctggggggttcctgagactctcctgtgcagcctcgggattcacctttggtgattatgccatgcactgggtccgtcaggctccggggaaaggtctggaatgggtctctcttattaattgggatggtagtatcacgaactatgcagactctgtgaagggtcgattcaccatctccagagacaacagcaaaaacttcctgtatctgcaaatgaacagtctgagagctgaggacagcgccttgtattattgtgcaaaagacagtagtggatataatgatgcttttgagatctggggccaagggacaccggtcaccgtctcttcag

SEQ ID NO: 2993 - DNA, 361 bp, synthetic construct
  misc_feature 1..361: note = Synthetic construct
  source 1..361: mol_type = other DNA
gaagtgcagctggtggagtctgggggagtcgtggtacaccctggggggtccctgagactctcctgtgtagcctctggattcacctttgatgattatgccatgcactgggtccgtcaggctccggggaagggtctggagtgggtctctcttattaattgggatggtagtagtacatcctatgcagactctgtgaagggtcggttcaccatctccagagacaactccaaaaactccctctttctgcaaatgaacagtctgagagctgaggacaccgccctgtattattgtgtgaaagataaaacccgtggccatcagtacttccaacactggggccagggcaccgtggtcaccgtctcctcag

SEQ ID NO: 2994 - DNA, 358 bp, synthetic construct
  misc_feature 1..358: note = Synthetic construct
  source 1..358: mol_type = other DNA
gaggtgcagctggtggaatctgggggaatcgtggtacagccgggggggtccctgacactctcctgtgcagcctctggatttacttttaaagattttgccatgcactgggtccgtcgggtgccggggaagggtctggagtgggtctctgccattacttgggatggtggtcacacattctatggagactctgcgcagggtcgcttcagcgtctccagagacaacgacaaaaagttcctgtatctgcacatgaagagtctgagagctgaagacaccgccttcttttactgtgcaaaagatgagggatttttgactggtttttctcattggggccagggaaccctggtcaccgtctcctcag

SEQ ID NO: 2995 - DNA, 364 bp, synthetic construct
  misc_feature 1..364: note = Synthetic construct
  source 1..364: mol_type = other DNA
gaggtccagctggtacagtccggggctgaggtgaagaagcctggggccaccgtgaaaatctcctgcaaggcttctggatacaccttcaccgactactacatgcactgggtgcaacaggcccctggaaaagggcttgagtggatgggacgtgttgatcctgaagatggtgaaacaatatatgcagagaagttccagggcagagtcaccataaccgcagacacgtctacagacacagcctacatggagctgagcagcctgagatctgaggacacggccgtgtattactgtgcaacaccctcgcgtagggggtggttattatgggttgactactggggccagggaaccctggtcaccgtctcctcag

SEQ ID NO: 2996 - DNA, 358 bp, synthetic construct
  misc_feature 1..358: note = Synthetic construct
  source 1..358: mol_type = other DNA
gaggtccagctggtacagtccggggctgaggtgaagaagcctggggccaccgtgaaaatctcctgcaaggcttctggatacaccttcaccgactactacatgcactgggtgcaacaggcccctggaaaagggcttgagtggatgggacgtgttgatcctgaagatggtgaaacaatatatgcagagaagttccagggcagagtcaccataaccgcagacacgtctacagacacagcctacatggagctgagcagcctgagatctgaggacacggccgtgtattactgtgcaacagaaggatatagtggctacgactttgactactggggccagggaaccctggtcaccgtctcctcag

SEQ ID NO: 2997 - DNA, 346 bp, synthetic construct
  misc_feature 1..346: note = Synthetic construct
  source 1..346: mol_type = other DNA
gaggtccagctggtacagtccggggctgaggtgaagaagcctggggccaccgtgaaaatctcctgcaaggcttctggatacaccttcaccgactactacatgcactgggtgcaacaggcccctggaaaagggcttgagtggatgggacgtgttgatcctgaagatggtgaaacaatatatgcagagaagttccagggcagagtcaccataaccgcagacacgtctacagacacagcctacatggagctgagcagcctgagatctgaggacacggccgtgtattactgtgcaacagatacccctattcgggagtggggccagggaaccctggtcaccgtctcctcag

SEQ ID NO: 2998 - DNA, 361 bp, synthetic construct
  misc_feature 1..361: note = Synthetic construct
  source 1..361: mol_type = other DNA
gaggtccagctggtacagtccggggctgaggtgaagaagcctggggccaccgtgaaaatctcctgcaaggcttctggatacaccttcaccgactactacatgcactgggtgcaacaggcccctggaaaagggcttgagtggatgggacgtgttgatcctgaagatggtgaaacaatatatgcagagaagttccagggcagagtcaccataaccgcagacacgtctacagacacagcctacatggagctgagcagcctgagatctgaggacacggccgtgtattactgtgcaacagatcagggtagtggttattactactttgactactggggccagggaaccctggtcaccgtctcctcag

SEQ ID NO: 2999 - DNA, 358 bp, synthetic construct
  misc_feature 1..358: note = Synthetic construct
  source 1..358: mol_type = other DNA
gaggtccagctggtacagtccggggctgaggtgaagaagcctggggccaccgtgaaaatctcctgcaaggcttctggatacaccttcaccgactactacatgcactgggtgcaacaggcccctggaaaagggcttgagtggatgggacgtgttgatcctgaagatggtgaaacaatatatgcagagaagttccagggcagagtcaccataaccgcagacacgtctacagacacagcctacatggagctgagcagcctgagatctgaggacacggccgtgtattactgtgcaacagccaacattggggctattactatagcctactggggccagggaaccctggtcaccgtctcctcag

SEQ ID NO: 3000 - DNA, 355 bp, synthetic construct
  misc_feature 1..355: note = Synthetic construct
  source 1..355: mol_type = other DNA
gaggtccagctggtacagtccggggctgaggtgaagaagcctggggccaccgtgaaaatctcctgcaaggcttctggatacaccttcaccgactactacatgcactgggtgcaacaggcccctggaaaagggcttgagtggatgggacgtgttgatcctgaagatggtgaaacaatatatgcagagaagttccagggcagagtcaccataaccgcagacacgtctacagacacagcctacatggagctgagcagcctgagatctgaggacacggccgtgtattactgtgcaacagccgctagtagtggttattttttctactggggccagggaaccctggtcaccgtctcctcag

SEQ ID NO: 3001 - DNA, 382 bp, synthetic construct
  misc_feature 1..382: note = Synthetic construct
  source 1..382: mol_type = other DNA
gaggtccagctggtacagtccggggctgaggtgaagaagcctggggccaccgtgaaaatctcctgcaaggcttctggatacaccttcaccgactactacatgcactgggtgcaacaggcccctggaaaagggcttgagtggatgggacgtgttgatcctgaagatggtgaaacaatatatgcagagaagttccagggcagagtcaccataaccgcagacacgtctacagacacagcctacatggagctgagcagcctgagatctgaggacacggccgtgtattactgtgcaacagcgggtggttacgatattttgactggttattatagccccggtgcttttgatatctggggccaagggacaatggtcaccgtctcttcag

SEQ ID NO: 3002 - DNA, 369 bp, synthetic construct
  misc_feature 1..369: note = Synthetic construct
  source 1..369: mol_type = other DNA
gaggtccagctggtacagtccggggctgaggtgaagaagcctggggccaccgtgaaaatctcctgcaaggcttctggatacaccttcaccgactactacatgcactgggtgcaacaggcccctggaaaagggcttgagtggatgggacgtgttgatcctgaagatggtgaaacaatatatgcagagaagttccagggcagagtcaccataaccgcagacacgtctacagacacagcctacatggagctgagcagcctgagatctgaggacacggccgtgtattactgtgcaactgtaactactgggaggggctactactactactacatggacgtctggggcaaagggaccacggtcaccgtctcctca

SEQ ID NO: 3003 - DNA, 361 bp, synthetic construct
  misc_feature 1..361: note = Synthetic construct
  source 1..361: mol_type = other DNA
gaggtccagctggtacagtccggggctgaggtgaagaagcctggggccaccgtgaaaatctcctgcaaggcttctggatacaccttcaccgactactacatgcactgggtgcaacaggcccctggaaaagggcttgagtggatgggacgtgttgatcctgaagatggtgaaacaatatatgcagagaagttccagggcagagtcaccataaccgcagacacgtctacagacacagcctacatggagctgagcagcctgagatctgaggacacggccgtgtattactgtgcaaggaggcattacgatattttgacttcggtcgacccctggggccagggaaccctggtcaccgtctcctcag

SEQ ID NO: 3004 - DNA, 358 bp, synthetic construct
  misc_feature 1..358: note = Synthetic construct
  source 1..358: mol_type = other DNA
gaggtccagctggtacagtccggggctgaggtgaagaagcctggggccaccgtgaaaatctcctgcaaggcttctggatacaccttcaccgactactacatgcactgggtgcaacaggcccctggaaaagggcttgagtggatgggacgtgttgatcctgaagatggtgaaacaatatatgcagagaagttccagggcagagtcaccataaccgcagacacgtctacagacacagcctacatggagctgagcagcctgagatctgaggacacggccgtgtattactgtgcaatggttatggctacaatgaggagggttgactactggggccagggaaccctggtcaccgtctcctcag

SEQ ID NO: 3005 - DNA, 358 bp, synthetic construct
  misc_feature 1..358: note = Synthetic construct
  source 1..358: mol_type = other DNA
gaggtccagctgttacagtccgagactgaggtgaagaagtctggggccaccgtaaaaatctcctgcaaggcttctggatacaccttcacctcctaccacatgcactgggtgcaacgggccccaggaagagggtttgagtggatgggacgtgttgatccagaagatggtgaaacaaaatatgcagacaggtttcggggcagagtcaccatgaccgcagacacgtctacaaatacagcctacatggagttgagcagcctgagattggaagacacggccgtctattactgtgcgacgcacttcgacggctacaatctacccgactactggggccagggaaccctagtctccgtctccccag

SEQ ID NO: 3006 - DNA, 355 bp, synthetic construct
  misc_feature 1..355: note = Synthetic construct
  source 1..355: mol_type = other DNA
gaggtccacttgctccagtccggggctgaggtgaagaagcctggggccaccgtgaaaatctcctgcagggcttccggatacaccttcaccgactactacatgcactgggtgcatcaggcccctggcaaaggccttgagtggatgggacgtgttgatcctgaaaataatgaagcgatttatgcagaaaagttctatggcagcgtcaccatgaccgccgacacgtctacacaaacaacatttttggagttgagcagtctgaagtttgcggacacggccgtttattactgtgtgaccctctctgcccctgttacctcacgccagtggggccagggaaccctggtcaccgtctcctcgg

SEQ ID NO: 3007 - DNA, 376 bp, synthetic construct
  misc_feature 1..376: note = Synthetic construct
  source 1..376: mol_type = other DNA
caggtgcagctggtgcagtctggggctgaggtgaagaagcctggggcctcagtgaaggtttcctgcgaggcatctggatacaccttcaccagctactatatgcactgggtgcgacaggcccctggacaaggacttgaatggatgggaataatcaaccctagtggtggtagcacatactacgcacagaagttccagggcagagtcaccatgaccagggacacgtccacgagcacagactatatggagatgagaagcctgagatctgaggacacggccgtgtattactgtgcgagagcctcaggtggatatagtggctacgaccaatggtactactttgactactggggccagggaaccctggtcaccgtctcctcag

SEQ ID NO: 3008 - DNA, 358 bp, synthetic construct
  misc_feature 1..358: note = Synthetic construct
  source 1..358: mol_type = other DNA
caggtgcagctgctgcagtctggggctgaggtgaaggagcctggggcctcagtgaaagtctcctgcaaggcatctggatacaccttcaccaggtactatatgcactgggtgcgacaggcccctggacaaggccttgagtggatgggagtgatcagaccttctggtggtagcacaatctacgcacagaagctccaggacagagtctccctgaccagggacacgtccacgagcacaatgtacatggtactcaacagcctgagatctgaagacacggccgtctattattgtctgttactggaaggtttgacagcaacttctactgactggggccagggcaccctggtcaccgtctcctcag

SEQ ID NO: 3009 - DNA, 370 bp, synthetic construct
  misc_feature 1..370: note = Synthetic construct
  source 1..370: mol_type = other DNA
caggtgcaactggtgcagtctggggctgaggtgaggaagcctggggcctcagtgaaagtttcctgcaaggcgtctggttacaccttcacttcctacttcatgcactgggtgcgacaggcccctggacaagggcctgagtgggtggctatgatcaaccctagtggtggtaccccaagttacgcacacaggttccggggccgagtcaccatgaccagtgacacgtccacgagcacagtttacctggagctgaccagcctgacacctgaggacacggccgtgtattactgtgcgagatgcgaaattttgaccggttattatagttgccacttcgactcctggggccagggaaccctggtcaccgtctcctcag

SEQ ID NO: 3010 - DNA, 372 bp, synthetic construct
  misc_feature 1..372: note = Synthetic construct
  source 1..372: mol_type = other DNA
caggtgcagctggtgcagtctggggctgaggtgaagaagcctggggcctcagtgaaggtttcctgcaaggcatctggatacaccttcaccagctactatatgcactgggtgcgacaggcccctggacaagggcttgagtggatgggaataatcaaccctagtggtggtagcacaagctacgcacagaagttccagggcagagtcaccatgaccagggacacgtccacgagcacagtctacatggagctgagcagcctgagatctgaggacacggccgtgtattactgtgcgagattgaatggtgactacgaagaggggaactactactacatggacgtctggggcaaagggaccacggtcaccgtctcctca

SEQ ID NO: 3011 - DNA, 358 bp, synthetic construct
  misc_feature 1..358: note = Synthetic construct
  source 1..358: mol_type = other DNA
caggtgcagctggtgcagtctggggctgaggtgaagaagcctggggcctcagtgaaggtttcctgcaaggcatctggatacaccttcaccagctactatatgcactgggtgcgacaggcccctggacaagggcttgagtggatgggaataatcaaccctagtggtggtagcacaacctacgcacagaagttccagggcagagtcaccatgaccagggacacgtccacgagcacagtctacatggagctgagcagcctgagatctgaggacacggccgtgtattactgtgcgagtggggttgatacagcctatgcttttgatatctggggccaagggacaatggtcaccgtctcttcag

SEQ ID NO: 3012 - DNA, 376 bp, synthetic construct
  misc_feature 1..376: note = Synthetic construct
  source 1..376: mol_type = other DNA
caggtgcaggtggtgcagtctggggctgaggtgaagaagcctggggcctcagtgaaggtttcctgcaaggcatctggatacatcttcaccagcttctttatgcactgggtgcgacaggcccctggacaagggcttgagtggatgggagtaatcaaccctaatagtggtagctcaacctacgcccagaagttccagggcagagtcaccatgaccagggacacgtccgcgagcacagtgtccatggagctgagcagcctgagatctgaggacacggccgtatattactgtgtgagagaaagggcccttcggcctaatatagcagctcgtggaccctttgactactggggccagggaaccctggtcaccgtctcatcag

SEQ ID NO: 3013 - DNA, 370 bp, synthetic construct
  misc_feature 1..370: note = Synthetic construct
  source 1..370: mol_type = other DNA
caggtgcagctggtgcagtctggggctgaggtgaagaagcctggggcctcagtgaaggtctcctgcaaggcttctggatacaccttcaccggctactatatgcactgggtgcgacaggcccctggacaagggcttgagtggatgggatggatcaaccctaacagtggtggcacaaactatgcacagaagtttcagggcagggtcaccatgaccagggacacgtccatcagcacagcctacatggagctgagcaggctgagatctgacgacacggccgtgtattactgtgcgagagataatcagttgaggagcagcacactatggggctttgactactggggccagggaaccctggtcaccgtctcctcag

SEQ ID NO: 3014 - DNA, 358 bp, synthetic construct
  misc_feature 1..358: note = Synthetic construct
  source 1..358: mol_type = other DNA
caggtgcagctggtgcagtctggggctgaggtgaagaagcctggggcctcagtgaaggtctcctgcaaggcttctggatacaccttcaatgcctactatatgcactgggtgcgacaggcccctggacaagggcttgagtggatgggatggatcaaccctaacagtggtggcacctactatgcagagaagtttcggggcagggtcaccctgaccagggacacgtccatcagtacagtctacatggaggtgggcaggctgagatctgacgacacggccgtctattactgtgcggcggtcagggggagcttctttcaccttcaccactggggccagggaaccctggtcaccgtctcgtcag

SEQ ID NO: 3015 - DNA, 373 bp, synthetic construct
  misc_feature 1..373: note = Synthetic construct
  source 1..373: mol_type = other DNA
caggtgcagctggtgcagtctggggctgaggtgaagaagcctggggcctcagtgaaggtctcctgtaaggcttctggatataccttcaccggctactatatgcactgggtgcgacaggcccctggacaagggcttgagtggatgggatggatcaaccctaacagtggtggcacaaactatggtcagaaatttcaaggcagggtcaccatgaccagggacacgtccttcagcacagtttacatggatctgagcaggctgacatctgacgacacggccgtgtattactgtgtgagagatctctggtcgatctacggtgacttcatcaagggatttgtcgactggggccagggaaccctggtcaccgtctcctcag

SEQ ID NO: 3016 - DNA, 352 bp, synthetic construct
  misc_feature 1..352: note = Synthetic construct
  source 1..352: mol_type = other DNA
caggtgcagctggtgcagtctggggccgaggtgaagaaccctggggcctcagtgaaggtttcctgcaaggcatctggatacaccttcaccgactactatatgcactgggtgcgacaggcccctggacaagggcttgagtggatggggacaatcaaccctagtggtggtaacacaaagtacgcacagaagttccggggcagagtcaccatgaccagggacacgtccaccagcacagtatacatggacctgagcagcctgagatctgacgacacggccgtgtattactgtgcgagagcatacaattattcttgtggattctggggccagggaaccctggtcaccgtctcctcag

SEQ ID NO: 3017 - DNA, 370 bp, synthetic construct
  misc_feature 1..370: note = Synthetic construct
  source 1..370: mol_type = other DNA
caggtgcagttggtgcagtctggggctgaagtgaagcagcctggggcctcagtgaaggtgtcctgcaaggcatctggatacaattttaccacatatcacatgcactgggtgcgacaggcccctggccaggggcttgagtggatgggattaatcaatcccaatgatggaaacacagccaacgaacagaagttccagggcagagtcaccatgaccagggacacgtccacgagcaccgtgtacatggagttgagcagcctgagatctgacgacacggccgtgttttactgtgtgataggccgagcagcaggtggaaggggcactgacgcttttgcgatctggggccaggggacaaagctcatcgtctcttcag

SEQ ID NO: 3018 - DNA, 367 bp, synthetic construct
  misc_feature 1..367: note = Synthetic construct
  source 1..367: mol_type = other DNA
caggtccagctggtacagtctggggctgaggtgaagaagcctggggcctcagtgaaggtctcctgcaaggtttccggatacaccctcactgaattatccatgcactgggtgcgacaggctcctggaaaagggcttgagtggatgggaggttttgatcctgaagatggtgaaacaatctacgcacagaagttccagggcagagtcaccatgaccgaggacacatctacagacacagcctacatggacctgagcagcctgagatctgaggacacggccgtgtattactgtgcaacagatctactatggttcggggagcgtgatgcttttgatatctggggccaagggacaatggtcaccgtctcttcag

SEQ ID NO: 3019 - DNA, 352 bp, synthetic construct
  misc_feature 1..352: note = Synthetic construct
  source 1..352: mol_type = other DNA
caggtccagctggtacagtctggggctgaggtgaagaagcctggggcctcagtgaaggtctcctgcaaggtttccggatacaccctcactgaattatccatgcactgggtgcgacaggctcctggaaaagggcttgagtggatgggaggttttgatcctgaagatggtgaaacaatctacgcacagaagttccagggcagagtcaccatgaccgaggacacatctacagacacagcctacatggagctgagcagcctgagatctgaggacacggccgtgtattactgtgcaacttgggagcagggctggtcggtctactggggccagggaaccctggtcaccgtctcctcag

SEQ ID NO: 3020 - DNA, 379 bp, synthetic construct
  misc_feature 1..379: note = Synthetic construct
  source 1..379: mol_type = other DNA
caggtccatcttgtgcagtctggggctgaggtgaagaagcctggggcctcagtgaaggtttcctgcaaggctactggatacaccttcagtatttatgctatgcactgggtgcgccaggcccccggacaaaggcttgagtggatgggacgcatcaacggtgacaatggtaacacaaaatattcacagaagttccagggcagaatcacccttaccagggacacatccgcgagcacagcctacatggaattgaacagtctgacatctgaagacacggctgtctattactgtacgagagttcgacttcgtatagatgcaataggggcccgcagcaactggttcgacccctggggccagggaaccctggtcaccgtctcctcag

SEQ ID NO: 3021 - DNA, 361 bp, synthetic construct
  misc_feature 1..361: note = Synthetic construct
  source 1..361: mol_type = other DNA
caaatgcagctggtgcagtctgggcctgaggtgaagaagcctgggacctcagtgaaggtctcctgcaaggcttctggattcacctttactagctctgctatgcagtgggtgcgacaggctcgtggacaacgccttgagtggataggatggatcgtcgttggcagtggtaacacaaactacgcacagaagttccaggaaagagtcaccattaccagggacatgtccacaagcacagcctacatggagctgagcagcctgagatccgaggacacggccgtgtattactgtgcggcagtctcccaccagtctggtggtgcttttgatatctggggccaagggacaatggtcaccgtctcttcag

SEQ ID NO: 3022 - DNA, 358 bp, synthetic construct
  misc_feature 1..358: note = Synthetic construct
  source 1..358: mol_type = other DNA
caggtgcagctggtggagtctgggggaggcgtggtccagcctggggggtccctgagactctcctgttcagcctctggatctaacttcaaaaactttggcatgcattgggtccgccaggccccaggcaaagggctggagtgggtggctgtcatatcatatgatgggaggcaagaattttacgcagactccgtgaagggccgattcaccatctccagagacaactccaagaaaacgatgtatctgcaaatgaacagtctgagacttgaggacacggctgtttattactgtgcgagagaccatgggagcgactggtacttcgatctctggggccgtggcaccctgctcactgtctcctcag

SEQ ID NO: 3023 - DNA, 364 bp, synthetic construct
  misc_feature 1..364: note = Synthetic construct
  source 1..364: mol_type = other DNA
caggtccagcttgtgcagtctggggctgaggtgaagaagcctggggcctcagtgaaggtttcctgcaagacttctggatacaccttcactaggtatgctatgcattgggtgcgccaggcccccggacaaaggcttgagtggatgggatggatcaacgctggcaatgataacacaaaatattcacagaagttccagggcagagtcaccattaccagggacacatccgcgagcacagcctacatggagctgagcagcctaaaatctgaagacacggctgtgtattattgtgcgagagaaataactgagttttactatggttcgggggactactggggccagggaaccctggtcaccgtctcctcag

SEQ ID NO: 3024 - DNA, 376 bp, synthetic construct
  misc_feature 1..376: note = Synthetic construct
  source 1..376: mol_type = other DNA
caggtccagcttgtgcagtctggggctgaggtgaagaagcctggggcctcagtgaaggtttcctgcaaggcttctggatacaccttcactagctatgctatgcattgggtgcgccaggcccccggacaaaggcttgagtggatgggatggatcaacgctggcaatggtaacacaaaatattcacagaagttccagggcagagtcaccattaccagggacacatccgcgagcacagcctacatggagctgagcagcctgagatctgaagacacggctgtgtattactgtgcgagagatcggctctgtagtggtggtagctgctactccgggtggttcgacccctggggccagggaaccctggtcaccgtctcctcag

SEQ ID NO: 3025 - DNA, 370 bp, synthetic construct
  misc_feature 1..370: note = Synthetic construct
  source 1..370: mol_type = other DNA
caggtccagcttgtgcagtctggggctgaggtgaagaggcctggggcctcagttaatctttcctgcgagacttctggatacaccttcacaagctatgctatgcattgggtgcgccaggcccccggacaagggcttgagtggatgggatggatcaacactggcaagggctatacaaaatattcacagaaattccagggcagagtcaccattaccagggccacatccgcgaccacagtctatttgggcctgaacagcctgacatctgaagacacggcactatattactgtgcgagagatccaaccccttactatgaggggggttggtacttcgatctctggggccgtggcactttggtcactgtctccccag

SEQ ID NO: 3026 - DNA, 364 bp, synthetic construct
  misc_feature 1..364: note = Synthetic construct
  source 1..364: mol_type = other DNA
caggtccagcttgtgcagtctggggctgaggtgaagaagcctggggcctcagtgaaggtttcctgcaaggcttctggatacaccttcattagttatgccatgcattgggtgcgccaggcccccggacagaggcttgagtggatgggatggatcaaccctggcaacggtaacacaaaatattcacagaagttccagggcagaatcaccattagcagtgacacatccgcgagtacagtctacatggaactgagtagcctgagatctgaagacacggctgtgtattactgtgcgagaaacctagattactatggtttgggggagttcgacccctggggccagggaaccctggtcaccgtctcctcag

SEQ ID NO: 3027 - DNA, 358 bp, synthetic construct
  misc_feature 1..358: note = Synthetic construct
  source 1..358: mol_type = other DNA
gacgtccaagtggtacagtccggggctgaggtgaagaagcctggggccaccgtgaaaatctcctgtaaggcttctggatacaccttcaccgaccacttcatgcattgggtgcgccaggcccctggagaagggcttgagtggatgggacgtattaatcctgaaaatgatgaaaccatgtatgcagcgagattccagggcagagtcaccataaccgcagacacatccacagacacaacgtacatgcagctgaccagcctgagatctgacgacacggccgtgtattattgtgcaacactggcggttcgaagagtcccacgcccgtactggggccaaggaaccctggtcaccgtctcctcat

SEQ ID NO: 3028 - DNA, 358 bp, synthetic construct
  misc_feature 1..358: note = Synthetic construct
  source 1..358: mol_type = other DNA
gaggtgcaactggtggagtctgggggaggcctggtcaaatctggggggtccctgagactctcctgtgcagcctctggattcaccttcagtgcctatagaatggactgggtccgccaggctccagggaaggggctggagtgggtctcatccattagttatagtagtaattacatatactactcagactcagtgaagggccgattcaccatctccagagacaacgccaagaattccctgcatctggacatggacagtctgagagtcgaggacacggctgtctattattgtgtgcgagcgcaccgggggagcccctactttgactcctggggccagggaaccctggtcaccgtctcctcag

SEQ ID NO: 3029 - DNA, 373 bp, synthetic construct
  misc_feature 1..373: note = Synthetic construct
  source 1..373: mol_type = other DNA
gaggtgcagctggtggagtctgggggaggcttggtccagcctggagggtccctgagactctcctgtgcagcctctggattcaccttcagtgaccactacatggactgggtccgccaggctccagggatgggactggagtgggttggccgtgctggagacaaaattcacaattatatcatagaatacgccgcgtctgtggaaggcagattcaccatctcaagagatgaatcagagaactcgctgtatctgcaaatgaacaacctgagacccgaggacacggccatgtattattgtgctagagcctctgggggatctacagtccaccgctactatgactactggggccagggaaccctggtcagcgtctcctcag

SEQ ID NO: 3030 - DNA, 367 bp, synthetic construct
  misc_feature 1..367: note = Synthetic construct
  source 1..367: mol_type = other DNA
caggtccaactggtggagtctgggggaggcgtggtccagcctgggaggtccctgagactcgcctgtgaagcgtctgggtttgccttcagccgctatggcatggattgggtccgccaggcgccaggcaagggtctggagtgggtggcaggtatatggtatgatggaagtaataaattttatgcagactccgtgaagggccgattcaccatatccagagacaattccaaggacacactttttctcgaaatgaacagcctgagagacgacgacacggctgtctactactgtgttaaagatggagacagcaacaccgcatacttccactttgacacttggggccagggaaccctggtcaccgtctcctccg

SEQ ID NO: 3031 - DNA, 385 bp, synthetic construct
  misc_feature 1..385: note = Synthetic construct
  source 1..385: mol_type = other DNA
gaggtgcaactagtggagtctgggggagtcttgggacagccagggcggtccctgagactctcctgtacagcctctggattcaggtttggtgattatgccatggcctgggtccgccaggctccagggaaggggctgttgtggatcggtttcattagagataagtctcacggcgcgacaacggactatgccgcgcctctgaaaggcagattcgtaatctcaagagatgattccaaaagtgtcgcctatcttcaaatcgacagcctgagcaccgacgacacaggcttctattattgtactagagcctcttactgtattaatggaagatgcacgtcacctggcccctttgacttctggggccggggaaccctggtcaccgtctcctcag

SEQ ID NO: 3032 - DNA, 370 bp, synthetic construct
  misc_feature 1..370: note = Synthetic construct
  source 1..370: mol_type = other DNA
gaggtgcagctggtggagactggaggaggcttgatccagccgggggggtccgtgagactctcctgtacagcctctgggttcaccgtcagcagctaccagatggcctgggtccgccagtctccagaaaaggggctggattgggtctcacttatttatatcggtggaagcacatactacgcagactccgtgaagggccgattcaccatctccagagacaattcgaagaacactctctatcttcaaatggacagcctgagagtcgaggacacggccgtgtattactgtgccagagggggcttccatgacgaataccgggccctttcgccctttgacttctggggccagggaaccccggtcagcgtctcatcag

SEQ ID NO: 3033 - DNA, 382 bp, synthetic construct
  misc_feature 1..382: note = Synthetic construct
  source 1..382: mol_type = other DNA
gaggtgcagttggtggagtctgggggaggcctggtcaaggcgggggggtccctgacactctcgtgtgaagcctccggattcatgtttggtagttatgccatggcgtgggtccgcaaggcgccagggaaggggctggagtgggtctcctccattagtcacagtagtagttatgtaggatatgcagactcagtgaggggtcgattcaacatctccagagacgacgccaaaaattcattgtacctccacatgagcagcctgacaggcgacgacacggctgtctattactgtgcgagagaccgccttcatgacccatccgcggtgcgcttttttgactggtcgtttgacaagtggggccagggcgccctgctcaccgtgtccgcag

SEQ ID NO: 3034 - DNA, 373 bp, synthetic construct
  misc_feature 1..373: note = Synthetic construct
  source 1..373: mol_type = other DNA
caggtgcaactggtggagtctgggggaggcatggtcatgcctggagggtccctgaggctctcctgtgcagcctctggattcaccttcaaagaccactatatggcttggatccgccagactccagggcagggactggagtggattgcatatgtcagtagtagtggacaaaccactgagtatggagactctgtgaagggccgattcaccgtctccagggacagcgccgagagtgcaatttttcttgaaatgaacaccctgagagtcgaggacacggctgtctatttctgtgcgagaatgtcttattacgatggaagtggttactacttcttctttgaccactggggccagggagcccaggtcaccgtctcctcag

SEQ ID NO: 3035 - DNA, 281 bp, synthetic construct
  misc_feature 1..281: note = Synthetic construct
  source 1..281: mol_type = other DNA
ggacacctacatgggctggatccgccaggcaccagggaaggggctggagtggatttcatatattagtagtagtggtgatgacatgttctacgcagactctgtgaagggccgattcaccatctccagggacaacgccaagaactcactgtatctgcaaacgaacagcctgagagccgaggacacggctgtatattactgtgcgacagcgggggcccacagtaatggtttctattacggctttgagtcctggggccagggaacccgcgtcaccgtctcctcag

SEQ ID NO: 3036 - DNA, 369 bp, synthetic construct
  misc_feature 1..369: note = Synthetic construct
  source 1..369: mol_type = other DNA
gaggtgcaactggaggagtctgggggagggttggtccagcctggggggtccctgagactctcctgtttagcctctggattcacctttagaaactattggatgggctgggtccgccaggctccagggaaggggctggagtgggtggccaacataaaacaagatggaagtgagaagtactatgtggacgctgtgaagggccgaatcaccatctccagagacaatgccaagaactcactgtatctgcaaatgaacagcctgagagccgaggacacggctgtatattattgtgcgaggttccccataacacctactgctaactattactacatggacgtctggggcaaagggaccacggtcaccgtctcctca

SEQ ID NO: 3037 - DNA, 358 bp, synthetic construct
  misc_feature 1..358: note = Synthetic construct
  source 1..358: mol_type = other DNA
gaggcacaactgctggagtcggggggagacgtggtacgtccggggggctccctgagactctcctgttcagcctctggattcatctttggcaactatgccatgggctgggtccgccaggctccagggaaggggcttgagtgggtcgcaggcattagtcgtggtggtccctggacattctatatagagtccgtgaggggccgcttcaccatctccagagacaattccaggaacacgatggatctgcagatgttgtcgttgagagtcgaggacacggccttatattattgtgtgaaatatggtgcacaggaatggttaggggagtcttggggccagggaaccctggttgccgtctctgcag

SEQ ID NO: 3038 - DNA, 376 bp, synthetic construct
  misc_feature 1..376: note = Synthetic construct
  source 1..376: mol_type = other DNA
gaggtgcagctggtggagtctgggggaggcttggtacagcctggagggtccctgagactctcctgtgcagcctctggattcaccttcagtacttatgagatggtctgggtccgccaggctccagggaaggggctggagtggatttcatacattagtagtagtgatactaccatatactacgcagactctgtgaagggccgattcaccatctccagagacaacgccaagaattcactgtatttgcaaatgaacagcctgagagtcgaggacacggctgtttattactgtgcgagagggttcgacgcttatgattttttgcctggctctccctactttgactactggggccagggaacccaggtcaccgtctcctcag

SEQ ID NO: 3039 - DNA, 370 bp, synthetic construct
  misc_feature 1..370: note = Synthetic construct
  source 1..370: mol_type = other DNA
gaggtgcagctggtggagtctgggggaggcctggtcaagcctggggggtccctgagactctcctgtgcagtctctggattcatcctcagtgactatagcatggtctgggtccgccaggctccagggaaggggctggagtgggtctcgtccattgttactagtagtttttacataaactatgcagactcactgaagggccgattcaccatgtccagagacaatcccaagaagtccctgtatctgcaaatgaacagcctgagagccgaggacacgactgtgtgttgctgtgcgagactagtggagaggttctccccccacactttctactttcactactggggccagggaaccctggtcaccgtctcctcag

SEQ ID NO: 3040 - DNA, 384 bp, synthetic construct
  misc_feature 1..384: note = Synthetic construct
  source 1..384: mol_type = other DNA
gaggtgcagctggtggagtccgggggaggcttagttcagcctggggggtccctgagactctcctgtgcagcctctggattcaccttcagtaactactggatgtactgggtccgccaagctccagggaaggggctggtgtgggtctcacgtattaacagtgatgggactagcacaacctatgcggactccgtgaagggccgattctccatctccagagacaacgccaagaacacgctgtatttgcagttgaacagtctgagagccgaggacacggctgtatattactgtgcaagagatcgatctccccttattaagatttttggagtgcttatgggctcctacatggacgtctggggcaaagggaccacggtcaccgtctcctca

SEQ ID NO: 3041 - DNA, 358 bp, synthetic construct; identical to SEQ ID NO: 1764
  misc_feature 1..358: note = Synthetic construct
  source 1..358: mol_type = other DNA

SEQ ID NO: 3042 - DNA, 346 bp, synthetic construct
  misc_feature 1..346: note = Synthetic construct
  source 1..346: mol_type = other DNA
gaggtgcagctggtggaatctgggggagacttggtccagccgggggggtccttgagactctcctgtgcagcctctggattcaccgtcaatagcaactacatgtcctggttccgccaggctccagggaaggggccggagtgggtctcagtcatttatgccggtggaagtacatattacgcagactccgtgaaggacagattcatcatctccagagacaattccaagaacaccttgtatcttcaaatgaacagcctgagagtcgaggacacggctatgtatttctgtgcgagagtcctatttggggggcccctgtggggccagggaaccctggtcaccgtctcctcag

SEQ ID NO: 3043 - DNA, 367 bp, synthetic construct
  misc_feature 1..367: note = Synthetic construct
  source 1..367: mol_type = other DNA
gaggcggaattggtggaatctgggggacgcctggtcaagccgggggggtccgtcagactgtcttgtacagcctctggattcgcctttgttaaatacacgatgtcgtgggtccgccagtctccagggaagggactggaatgggtctcatccctttcctttggcagcgaattctcctactttgcagcctcactgcggggccgctctaacatctccagagacgatcttaccaattcgctttttctggacataagtctcctgagagtcgaagatacggctacatattactgtgcgcgcggtctcagtcccaactggtacttcgatgcttttgacatatggggccgggggaccacagtcaccgtctcttcag

SEQ ID NO: 3044 - DNA, 352 bp, synthetic construct
  misc_feature 1..352: note = Synthetic construct
  source 1..352: mol_type = other DNA
gaggtgcagttggtggagtctgggggaggcttggttcagccgggggggtccctgagactctcctgtgcagcctctggattcacttttagtaactatgccatgttctgggtccgccaggctccagggaaggggctggagtgggtctctggtgttagtgttgctggtagtggcacattctacgcagactccgtcaagggccggttcaccatctccagagacaattccaacaacgcgctgtctctgcaaatgaacagcctgagagccgaggacacggccgtatattactgtgcgaaagaatttagaggagcttttgatatctggggccaagggacaatggtcaccgtctcttcag

SEQ ID NO: 3045 - DNA, 370 bp, synthetic construct
  misc_feature 1..370: note = Synthetic construct
  source 1..370: mol_type = other DNA
caggtccagctggtgcagtctggggctgaggtgaaggagcctgggtcctcggtgaaggtctcctgccagacttctggaggcaccttcaatagtcatactattaattgggtgcgacaggcccctggacaaggtcttgagtgggtgggaggggtcgtccctatctttggtacaacaacctacgcagagaagtttcagggcagagtcacaattgccgcggacgcttccacgaacacagtctacatggagctcaggagcctgagatctgacgacacggccatgtattactgtgcgaggagacacagtggcgacgattcgcccagctacttctttgactactggggccatggaaccctggtcaccgtctcctcag

SEQ ID NO: 3046 - DNA, 367 bp, synthetic construct
  misc_feature 1..367: note = Synthetic construct
  source 1..367: mol_type = other DNA
caggtgcaactggtgcagtctggggctgcggtgaagacgcctggggcctcagtgaaggtctcctgcaagacctctggttacaccttcgacgagtatgatattaattgggtgcgacaggcctctggtcaagggcccgagtggatgggatggatgaaccctgccagtggcaacacaggttatgcacagaagttccagggcagagtgatcttttctagggacacttcctcaaggacggcctatatggagatcagcagtctgacatccgacgacacggccctttatttttgcacgagaggccgatacccccgcatgcttcgcaggcactttgacttctggggccagggaaccccggtcatcgtctcctcag

SEQ ID NO: 3047 - DNA, 370 bp, synthetic construct
  misc_feature 1..370: note = Synthetic construct
  source 1..370: mol_type = other DNA
caggtccagctggtgcaatctgaggctgaggtgaagaggcctgggtcctcggtcaaggtctcctgcagggcttctggaggcaccttcgacaactatgctattacctgggtgcgacaggcccctggacaaggtcttgagtggctgggagggacaatccctatcttcgacataccaaattccgcacagacgttgcacgccagagtcacgatcacgaccgacgagtccacgagcacagcctacatgcaactgagtagcctgacatctgaggacacggccgtctatttctgtgcgacccgaagacggatgttttcgaccaatgtcgattcttatgatatctggggccaagggacactggtcaccgtctcctcag

SEQ ID NO: 3048 - DNA, 367 bp, synthetic construct
  misc_feature 1..367: note = Synthetic construct
  source 1..367: mol_type = other DNA
gaaatgcaactggcgcagtctgggcccgaggtgagaaagcctggggcctcagtgagggtggcctgcaagacgtctggtctcaagtttgacaattcagcaattcactggatgcgacaaagtcgtggactacgccttgagtggatgggatggatcgtcgttgccggaatgaagacaaactacgcaccgaatttcgaaaatagagtcacaattacacgagagttgtctaccgaaacagtgtttatggaattgagaagcctcacagccgacgacacggccatgtattattgtgcggcagtccctgggggcctcttaattcgcgaaacgttcgagtcgtggggccagggaaccctggtcaccgtctcctcag

SEQ ID NO: 3049 - DNA, 361 bp, synthetic construct
  misc_feature 1..361: note = Synthetic construct
  source 1..361: mol_type = other DNA
gaggtccagctcgtacagtccggggctgaggtgaagaagcctggggccaccgtgagaatctcctgcagggcttctggatacaccttcaccgactactccattcactgggtgcaacaggcccctggaaaagggcttgagtggttgggtcgtgtagatcctgagaatggtgaaacaaaatatgcagagaactttcagggcagagtctccctgaccgcagacacgtctacagacacagcctacatggaactgagcagcctgagatctgacgacacggccgtttattactgtacaacagcccggggccgctggacctaccactttgcgtcctggggacagggagccctagtcaccgtctcctcag

SEQ ID NO: 3050 - DNA, 373 bp, synthetic construct
  misc_feature 1..373: note = Synthetic construct
  source 1..373: mol_type = other DNA
caggtgcaattggtgcagtctggggctgaggtgaagaagcctggggcctcagtgaaggtctcctgcaaggcttctggatacaccttccccggccactttattcactgggtgcgacaggcccctggacaagggcttgagtggatgggatggatcaaccctgaaagtggtgtcgcaaaggttgcacggaagtttcagggcagggtcaccctgaccagggacacgtccatcagtacagtctacatggacctgagtaggctgcggtctgacgacacggccgtctattactgtgcaagagcggcgatttttggagtggttttttgggaaaactatttcgacccctggggccagggaaccctggtgaccgtctcctcag

SEQ ID NO: 3051 - DNA, 349 bp, synthetic construct
  misc_feature 1..349: note = Synthetic construct
  source 1..349: mol_type = other DNA
caggtgcagctggtgcagtctggggctgaggtgaagaagcctggggcctcagtgaaggtctcctgcaaggcttctggatacaccttcaccggccactatattcactgggtgcgacaggcccctggacaagggcttgagtggatgggatggatcaaccctaacagtggcggcagaaactatgcacagaagttccaggacagggtcaccatgaccagggacacgtccatcagcacagcttacatggagttgagcaggctgagatctgacgacacggccgtgtattattgtgcgagatatgagtatgatcttgactactggggccagggaaccctggtcaccgtcacctcag

SEQ ID NO: 3052 - DNA, 385 bp, synthetic construct
  misc_feature 1..385: note = Synthetic construct
  source 1..385: mol_type = other DNA
gaggtccagctggtgcagtccggggctgaggtgaagaagcctggggccaccgtgaaaatctcctgcaaggcctctggatacaccttcagcgacttctacattcactgggtggtacaggcccctggaaaagggcttgagtggatgggacgtgttgttcctgaagatggtgaaacactgtatgcagcgaagttccagggcagagtctccataaccgcagacacgtccacaaacacagcctacatggagctgagaagcctgagatctgaggacacggccgtattttactgtgcaacagagggggtcggaaggactaataaagcaggtgttggttgggatgatgcttttgatatctggggccaggggacaatggtcaccgtctcctcag

SEQ ID NO: 3053 - DNA, 382 bp, synthetic construct
  misc_feature 1..382: note = Synthetic construct
  source 1..382: mol_type = other DNA
caggtgcaactggtgcaatctgggtctgaggtgaagaggactgggacctcagtgaaagtctcctgcaggacttctggatacaccttcgccgcctactctattcactgggttcgacaggcccctggacaagggcttgagtggatgggccggatcaattgtaacagtggtgccacaaactatgcgcagaggtttcagggcagggtcaccttgaccagagacatgtccatcgggacagcctacatggaactgagcaggctgacatctgacgacacggccctttatttctgtgcgaaatctaaaacccatactttttatcctggttcgggaggtcccacttacatcgacgactggggccagggaaccctggtcaccgtctccgccg

SEQ ID NO: 3054 - DNA, 369 bp, synthetic construct
  misc_feature 1..369: note = Synthetic construct
  source 1..369: mol_type = other DNA
caggtgcaactggtgcagtctggggctgaggtgaagaagcctggggcctcagtgaaggtctcctgcaaggcttctggatacacctttaccgcccactatattcagtgggtgcgacaggcccctggacaagggcttgagtggatgggatggatcaaccctagcagtggtggcacaaagtctgcacagagttttcaggacagagtcaccgtgaccagggacacgtccatcaacacggcctacctggaactgaggaggttgagatctgacgacacggccgtttattactgcgcgagagtgatggaaacagccatggcccccgactactacatggacgtctggggcaaagggaccacggtcaccgtctcctca

SEQ ID NO: 3055 - DNA, 373 bp, synthetic construct
  misc_feature 1..373: note = Synthetic construct
  source 1..373: mol_type = other DNA
caggtccgacttgtgcaatctggggctgaattgaagaagcctggggcctcagtgaaggtttcctgcaaggcttctggacacaccttcattgactatgctattcattggctgcgccaggcccccgggcaaaggcctgagtggttgggatacatcaatgctgacaatggtcgaacgagatattcaccgacatggcagggcagagtcacgtttgccagggacccaaccacgagtacggcctatatggaggtgaacagtctgacaacgtcagacacggctgtcttttattgtgcgagcgcgaactggactgcggtgatttcaacaaccgataccctccatgtctggggccaagggacattggtcaccgtctcctcag

SEQ ID NO: 3056 - DNA, 364 bp, synthetic construct
  misc_feature 1..364: note = Synthetic construct
  source 1..364: mol_type = other DNA
gcagtgcagctgttggagtctgggggaggcttggcacagccgggggggtccctgagactctcctgtgcagtctccggattcacctttaacacctatgccattcattgggtccgccaggctccaggcaaggggctggagtgggtctcggttatcagtggaggtggaggtaccacttactacgcagactccgtgaagggccggttcaccatctccagagacaattccaaggacaccttgtatctgcaaatgaacagcctgcgagccgaggacacggccgtatactactgtgcgaaggtgctgctgggagctcttaccgatgctttcgatatctggggccaagggacaatggtcaccgtgttttcag

SEQ ID NO: 3057 - DNA, 370 bp, synthetic construct; identical to SEQ ID NO: 1767
  misc_feature 1..370: note = Synthetic construct
  source 1..370: mol_type = other DNA

SEQ ID NO: 3058 - DNA, 388 bp, synthetic construct
  misc_feature 1..388: note = Synthetic construct
  source 1..388: mol_type = other DNA
gaggtccacctgctacagtccggggctgaggtgaagaagcctggggcctccgtgaaaatctcctgcaaggcttctggatacaccttcaccgactactacatttactgggtgcaacaggcccctggaaaaggccctgagtggatgggacgtgttgatcctgaagatggtgaaacaatatctgcagagaagttccagggcagagtcaccataaccgcagacacgtctacagacacagccttcatggacctgagtagcctgagatctgaggacacggccgtgtattactgtgcaacctcccctaagtttgatgataacgcctgggggacttttcgtgatacggccacacctgactactggggccagggaaccctggtcaccgtctcctcag

SEQ ID NO: 3059 - DNA, 369 bp, synthetic construct
  misc_feature 1..369: note = Synthetic construct
  source 1..369: mol_type = other DNA
caggtgcagttggtggagtctgggggaggcgtggtccagcctgggaggtccctgagactctcctgtgcagcctctggatacagtttcgccagttatggcctacactggctacgtcagactccaggcaaggggctggagtggttggctggtgtttcgtctgatgcatccaaaaaagactacgcagactccgtgaagggccgattcaccatttcaaaagacaatatgaggaacacactgtatttgcaactaaatagcctgagacctgaggacacggctgtctttttctgtgccagaggcgataggtcgataatagtaggtcaattttacatggacgtctgggggaaagggaccacggtcatcgtctcctca

SEQ ID NO: 3060 - DNA, 367 bp, synthetic construct
  misc_feature 1..367: note = Synthetic construct
  source 1..367: mol_type = other DNA
caggtccacctggtgcagtctggggcagaggtgaagaagccggggtcctcggtgaaggtctcctgccaggcatctggagggaccttcaggagtcactatctcacctgggtgcgacaggcccccggacaggggcttgagttcatgggagggatcctccctgttattgaaaaaccagactacgcacagaagtttcagggcagggtcacgatcaccacggacgaagacacgagcactgcctacttggttttgaccagtctgacatcagaagacacggccgtatatttctgtgcgcgatgtaaggccgaatatacgactggttgccccggggactattggggcccgggaaccctggtcatcgtctcgtcag

SEQ ID NO: 3061 - DNA, 361 bp, synthetic construct
  misc_feature 1..361: note = Synthetic construct
  source 1..361: mol_type = other DNA
cagctccagctggagcagtctggggctgaggtgaagaggcctgggtccgcagtgaaggtctcctgcatggcttctggagacgccttcagcagccatgctctcagctggatccgacaggcccctggacaagggcttgagtgggtgggagccatcatccctctctttggttcaccaaactacgcacagaagttccaggacagagtcacaattaccgcggacatgtccacgagtacagcctacatggaaattagtggcctgacatctgaggacacggccatctattactgtgcgcgacggttttattcttatggttttgcctttgatatctggggccgggggacaatggtcatcgtctcttcag

SEQ ID NO: 3062 - DNA, 379 bp, synthetic construct
  misc_feature 1..379: note = Synthetic construct
  source 1..379: mol_type = other DNA
caggtccacctggagcagtctggggctgaggtgaagaagcctgggtcctcggtgaaggtctcctgcaaggcttctggaggcaccctcagcgacttatctctcagctgggtgcgacaggtccctggacaagggcttgagtggatggggggggtcatccctgtacttgggacatcagacatcgctcaggcattccaagacagagtcactcttaccagggacgaatctaagaatacagcctacatggaactgagcaacctgagatctggggacacggccatttattactgtgcgagaggttggggtatatcgattggtggagcgacaaccaccaagtggctccacccctggggccagggaacccgggtcaccgtctcttcag

SEQ ID NO: 3063 - DNA, 382 bp, synthetic construct
  misc_feature 1..382: note = Synthetic construct
  source 1..382: mol_type = other DNA
caggtccagctggtgcagtctggggctgaggtgaagaagcctgggtcctcggtgaaggtctcctgcaaggcttctggaggctccttcagcggctttggtctcagttgggtgcgacaggcccctggacaagggcttgagtggatgggaggaatcatccccgtgtttggtgcaccaaattacgcacaaaagttcaagggcagagtcacgattagtgcggacgactccccgagtgcagcctacttggagctgagcagcctgacacctgaagacacggccatttattactgtgcgagagagggggcaggctattactatgatagcagtggcctgggatatggctttgatatctggggccaagggacaattgtcaccgtctcctcag

SEQ ID NO: 3064 - DNA, 358 bp, synthetic construct
  misc_feature 1..358: note = Synthetic construct
  source 1..358: mol_type = other DNA
gaggtgcaactggcggagtctgggggaggcctggtcaagcctggggggtccctgagactctcctgtgcagcctctggattcaacttctattcctataccctgaactgggtccgccaggctccagggaaggggctggagtggatcgcatccatcagtggtaatagtggttacaagtacttcgcaaactcagtgaagggccgaatcaccatctccagagacaactccaagaactcactgtttctgcaaatcaacagcctgcgagacgaggacacggctacttattactgtgcgagagctgatagcaccgactggcaaatggactactggggcctgggaaccctggtcaccgtctcctcag

SEQ ID NO: 3065 - DNA, 355 bp, synthetic construct
  misc_feature 1..355: note = Synthetic construct
  source 1..355: mol_type = other DNA
ggggtgcagctggtggagtctgggggaggcttggtacagcctggagggtccctgagactctcctgtgcagactctggattcaccttcagtaattatgaactgaactgggtccgccaggctccggggaagggactggagtggatttcatacatcactactagtggtggtaccatatactacgcagactctgtgaagggccgattcaccatctccagagacaactccaagagctcactgtatctgcaaatgaacagcctgagagtcgaggacacggctgtttattattgtgcgagacgatatggcttcactcccctcgacttctggggccagggaaccctggtcaccgtctccccag

SEQ ID NO: 3066 - DNA, 379 bp, synthetic construct
  misc_feature 1..379: note = Synthetic construct
  source 1..379: mol_type = other DNA
caggtacaactggtgcaatctgggtctgagttgaagaagcctggggcctcagtgaaggtttcctgcaaggcttctggatacaccttcactaattatgctctgaattgggtgcgacaggcccctggacaagggcttgagttgatgggatggatcaacacctacactgggaccccaacgtatgcccagggcttcccaggacggtttgtcttctccttggacacctctgtcagcacgacatatctgcagatcagcagcctaaaggctgaggacactgccatgtatttctgtgcgagagataatcggccttattatgatatgagtgggtattcacctgaccttgactactggggccagggaaccctggtcaccgtctcctcag

SEQ ID NO: 3067 - DNA, 367 bp, synthetic construct
  misc_feature 1..367: note = Synthetic construct
  source 1..367: mol_type = other DNA
gaggtacagctggtggagtctgggggaggcttggtccaggctggggggtccctaagactctcctgtacagcctctggattcacatttagttccttttggctgacctgggtccgccagactccagggagggggttggagtgggtggccaatataaacaaagatgggactaagacgtcctatgtggactctgtgctgggccgattcaccatctccagagacaacgccaagaactcactgtatcttcacgtgagcagcctgagagtcgaggacacggcaatgtattactgtgcgagagagacgtggggattccttggagggggctactttgactattggggccagggagtcctggtcaccgtctcctctg

SEQ ID NO: 3068 - DNA, 364 bp, synthetic construct
  misc_feature 1..364: note = Synthetic construct
  source 1..364: mol_type = other DNA
gagattcagttgttggagtctggaggaggcttggcacagcctggggggtccctgacactctcctgtgcagcctctggattcactttttccatttatgccctgacctgggtccgccaggctccagggaagggactggagtgggtcgcccaaattagtaacagtggtcataaaacatattatgcagactccgtgaagggccggttcaccatctccagagacaattccaagaacatgatatatctggaaatgaacagcctgcgagccgacgacacggccctatattactgtgcgaaatatcgcccaggacctaagaatgatgctttgcatgtctggggccaagggacaagggtcaccgtctcttcag

SEQ ID NO: 3069 - DNA, 358 bp, synthetic construct
  misc_feature 1..358: note = Synthetic construct
  source 1..358: mol_type = other DNA
gaggtgcacctggtggagtctgggggaggcttggtccagcctggggggtccctgagactctcctgtacagcctctggattcacctttagttccttttggctgagctgggtccgccaggctccagggaaggggctggagtgggtggccagcataaagcaggatggaagtgaaatccaccttctggactctgtgaagggccgattcaccatctccagagacaacgccaagaactcagtgtatctgcaaatgaacagcctgagaggcgaggacacgggaatgtattactgtgcgcgaatttattatagtgggacgtaccaagactactggggccagggaaccctggtcaccgtctcctcag

SEQ ID NO: 3070 - DNA, 387 bp, synthetic construct
  misc_feature 1..387: note = Synthetic construct
  source 1..387: mol_type = other DNA
gaggtgcaactggtggagtctgggggaggggtggttcagccagggcggtccctgagactctcctgtaaaggttctggattcaagtttggtgattatggtctgagctgggtccgccaggctcccgggaaggggctggagtgggtcgctttcgtgaaaagtagagttaatagtgggacaacagaatatgccgcgtctgtgaaaggcagaagtaacatcacaagagatgattccagaaacatcgtctatttatatgtggacagcctgaaaatggaggacacggccgtctattattgtactcgagataaaggaatgtatgactggaactccgggacctacctctactacatggacgcctggggcaaagggaccacggtcaccgtctcctca

SEQ ID NO: 3071 - DNA, 379 bp, synthetic construct; identical to SEQ ID NO: 1763
  misc_feature 1..379: note = Synthetic construct
  source 1..379: mol_type = other DNA

SEQ ID NO: 3072 - DNA, 358 bp, synthetic construct
  misc_feature 1..358: note = Synthetic construct
  source 1..358: mol_type = other DNA
gacgtgcagttggtggagtctgggggaggcttggtgaagccgggggggtcccttagactctcctgtgcagcctctagatcctctttcagtgacgactggctgagttggatccgcctgagtccaggcaaggggatggagtgggttggccgtattaaaagcaaaattgatggtgggacggcggactacgctgcagccgtgagaggcagattcaccatctcaagagacgattcaaaaaaaactctctatctgcaaatgaatagactgaagatggaggacaccgccgtgtattactgcaccgtccacattggcaccagcgctaacttctggggccagggaacccaggtcaccgtcgcctcag

SEQ ID NO: 3073 - DNA, 324 bp, synthetic construct
  misc_feature 1..324: note = Synthetic construct
  source 1..324: mol_type = other DNA
gggagaggttctgggttcatctttggtgattatgcgctgagttgggtccgccaggctcccgggaagggtctggagtgggtagggctcatgaaaaggagatcttatggtgtgacaacagactacgccgcgtctctgaaaggcagattcaccattacaagagatgatcccaaaaacatcacctatctacaaatgaacagcctgacaaccgaggacacagccgtctattattgtactagagatcgaggaacgtatgactggaactacgggacctacttctactacatggaagtctggggcaaagggaccacggtcaccgtctcatca

SEQ ID NO: 3074 - DNA, 387 bp, synthetic construct
  misc_feature 1..387: note = Synthetic construct
  source 1..387: mol_type = other DNA
gaggtgcagctggtgcaatccggggggggcctggtgcagccagggcggtccctcagactctcctgtagaggttctgggttcatctttggtgattatgcgctgagttgggtccgccaggctcccgggaagggtctggagtgggtagggctcatgaaaaggagatcttatggtgtgacaacagactacgccgcgtctctgaaaggcagattcaccattacaagagatgatcccaaaaacatcacctatctacaaatgaacagcctgacaaccgaggacacagccgtctattattgtactagagatcgaggaacgtatgactggaactacgggacctacttctactacatggaagtctggggcaaagggaccacggtcaccgtctcatca

SEQ ID NO: 3075 - DNA, 366 bp, synthetic construct
  misc_feature 1..366: note = Synthetic construct
  source 1..366: mol_type = other DNA
caggtgcagctggtacaatctggccctgagctgaagaagcctggggcctcagtgaaaatttcctgccaggcatctggatacaccttcaccgaccactatctgcactgggtccgacaggcccctggacaagggcttgagtggatgggaatgctcaaccctagtggtgataccaaagcctacgcacagaagttccagggcagagtcgccatggccagggacacgtccacgaccacattctacgtggagttgagcagtctgacatctgacgacacggccttatatttctgtgcgagagggggacgcacctttggttatacgtgggagttctttgacaactggggccagggaaccctggtcaccgtctcc

SEQ ID NO: 3076 - DNA, 369 bp, synthetic construct
  misc_feature 1..369: note = Synthetic construct
  source 1..369: mol_type = other DNA
caggtgcagctggtggagtctgggggaggcgtggtccagcctgggacgtccctgagactctcctgtgcaggctctggattcacgttccgtaattatggcctgcactgggtccgccaggctccaggcaaggggctggagtgggtgtcagttatttcatttcacggaaacaatgaaaactacgcagcctccgtgaatgggcgattcaccatctccagagacaactccaagaacacgttatatctccaaatgaacagcctgagacctgaagacacggctgtttattactgtgcgagagagagaagtccgagagtcgactactaccactacatggacgtctggggcaatgggaccacggtcaccgtctcctca

SEQ ID NO: 3077 - DNA, 361 bp, synthetic construct
  misc_feature 1..361: note = Synthetic construct
  source 1..361: mol_type = other DNA
cagatcacgttgagggagtctggtcctgcggtggttctccccacacagaccctcacactgacctgcaccttctctgaagtctctcaaaattctaatgcagcgggtctgggctggttccgtcggcccccaggaaaggccctagagtggcttgcattcactttctggaatgatgataggatttacagtccatctctgagtaacagactcaccatcaccaaggacacctccagacaccaagtggtcctcacattgaccgacgtgggccctgttgacacagccacatacttctgtgcacacagtccaacatattccaacatctttgacttctggggccaggggatcctggtcaccgtctcctcag

SEQ ID NO: 3078 - DNA, 370 bp, synthetic construct
  misc_feature 1..370: note = Synthetic construct
  source 1..370: mol_type = other DNA
caggttcaccttgagcagtctggagatgaggtgaagaagcctggggcctcagtgaaggtctcctgcaagacttctggttacacctttaccagttatagtcttatctgggtgcgccaggcccctggacaagggcctgaatgcatgggatggatcaccgtctatagtggtaacataaagtatgcacagaacttccagggcagaatgaatgtgaccatagacacacccacgagcacagcctacatggagctgaggagcctgaaatctgacgacacggccgtgtattactgtgtaagagcatattgtagtagtagcagctgcccaggcggttttgacttctggggccagggaaccctggtcaccgtctcgtcag

SEQ ID NO: 3079 - DNA, 358 bp, synthetic construct
  misc_feature 1..358: note = Synthetic construct
  source 1..358: mol_type = other DNA
caggtgcaggtgctggagtctgggggaggcgtggtccagcctgggaggtccctgagactctcctgtgcagcctctggattcacctttagttcgtatggcgtacactgggtccgccaggctccaggcaaggggctggagtgggtggcagtgacatcttttgatgggagatttaaatattacgcagactccgtgaagggccgattcaccttcgccacagacatttccaagaacaccttttatctgcaaatgaaccgcctgcgagttgaggacacggctatatattactgtgcgaagggccgtgcaaattggcgatactttgacctctggggccagggaaccctggtcaccgtctcctcag

SEQ ID NO: 3080 - DNA, 367 bp, synthetic construct
  misc_feature 1..367: note = Synthetic construct
  source 1..367: mol_type = other DNA
caggtccagcttgtgcagtctggggctgaggtgaagaagcctggggcctcagtgaaggtttcctgcaaggcctctggattcaccctcagaaattatgctgtacattggatgcgccaggcccccggacaacggcttgagtggatggggtggatcaacgctggcaacggttacacacaatattcgcagaatttacaaggcagagtcaccattaccagggacacatccgcgagcacggttgacatggaactgaggagcctgacatctgtagacacggctgtgtattactgtgcgagaattagagtcggggaattatttttcggcacctttgacttctggggccagggaaccctggtctccgtctcctcag

SEQ ID NO: 3081 - DNA, 378 bp, synthetic construct
  misc_feature 1..378: note = Synthetic construct
  source 1..378: mol_type = other DNA
caggtgcagctggtgcagtctggggctgaagtgaagaagcctggggcctcagtgacggtctcctgcaaggcttctggatacaccctctccacctatgatgtcaactgggtgcgacaggccactggacaaggccttgagtggttgggacggatgaaccctgaccgaggcaacacggtctcttcacagaagttccagggcagagtcacctttagcgtgaacacctccttgaatacagcctacatggcgctgagcagcctcacatctgaagacacggccgtctactactgtgcgagaggacgttttcagagagtgggaggcgtctacacctacttctacatggacgtctggggcacagggaccacggtcaccgtctcctcc

SEQ ID NO: 3082 - DNA, 367 bp, synthetic construct
  misc_feature 1..367: note = Synthetic construct
  source 1..367: mol_type = other DNA
caggtccaggtggtgcagtctggggctgaggtgaagaagcctgggtcctcggtgaaggtctcctgcgagactcttggaggcaccttcatcagttatagtgtcaactgggtgcgccaggcccctggacatgggcttgagtggatgggaggcatcatccctggctttggtgtggtgaattatgcacggatgttccagggcagagtcacgattaccgcggacgaatcgtcgaaaactgcctacatggagttgaaacgcctgacatctgaggacacggccgtctattactgtgtgaactccttcaaatacaggagcaacccgggggacttcggctcctggggccagggaaccctggtcaccgtctcctcgg

SEQ ID NO: 3083 - DNA, 379 bp, synthetic construct
  misc_feature 1..379: note = Synthetic construct
  source 1..379: mol_type = other DNA
caggtccagctggtgcagtctggggctgaggtgaagaagcctgggtcctcggtgaaggtctcctgcaaggcttctggaggcaccctcaccgactactctgtcacctgggtgcgacaggcccctggacaagggcttgagtggatggggggggccgtccctgtccttgggacttcagacatcgcacagaagttccgtgacagagtcactttttccgcggacccatcgacaggaactgtctacatggagctgactgacctcagatttggggacacggccacctactactgtgcgagaggttggggtattacgatttctggagcgtctaccagcaagtggctccacccctggggccagggaactctggtcaccgtctcctcct

SEQ ID NO: 3084 - DNA, 394 bp, synthetic construct
  misc_feature 1..394: note = Synthetic construct
  source 1..394: mol_type = other DNA
caggtccagctggtgcagtctggggctgcgatgaagaagcctgggtcctcggtgagggtctcctgcaaggctgctggaggcaccctcagcacctatggtgtcacctgggtgcgccaggcccctggacaagggcttgagtgtgtgggacagatcatccctatctttggtacaacaaactacgcacagaaattccagggcagagtcacaattagcgcggacgaatctacgaacacagtttacatggacctgagcagcctgagatctgaagacacggccatgtattactgtgcgagatttggctctccaactctccttattgactacggtgactacgaaaaggtgatcggtgctttggatgtctggggccaagggacaatggtcaccgtctcttcag

SEQ ID NO: 3085 - DNA, 385 bp, synthetic construct
  misc_feature 1..385: note = Synthetic construct
  source 1..385: mol_type = other DNA
caggtcctgctggtgcagtctggggctgaggtgaagaagcctgggtcctcgataaaggtctcctgcaaggcttctggggggaacttcagcaggaccgttgtcacgtgggtgcgacaggcccctggacaagggcttgaatgggtgggagagagcattcctatcttgggaacagcgaagtacgcacagaagttccaggacagagtcacaattacatcggacgaatcctcgaccactgcctacctagacctgcgcaacctgacatctgaagacacggccgtctattactgtgcgagaggtcacagaatatattatgatattagaagttattacggagagtcctggctcgacccctggggccagggaactctggtcaccgtctcctcag

SEQ ID NO: 3086 - DNA, 361 bp, synthetic construct
  misc_feature 1..361: note = Synthetic construct
  source 1..361: mol_type = other DNA
cagttcaccttgaaggagtctggtcctgtgctggtgaaacccacagagaccctcacgctgacctgcaccgtctctgcgttctcactcagcaatgttaaaatgggtgtcagctggatccgtcagcccccagggaaggccctggagtggcttgcacacattttttcgaatggcgaaaaatcctacagtacatctctgaagaccagactcactatctccaaggacacctccaaaagtcaggtggtccttatcatgaccaatttggaccctgtggacacagccacatattactgtgcacggatgctggcccgacagaattacttcgacccctggggccagggaacccaggtcaccgtctcctcag

SEQ ID NO: 3087 - DNA, 373 bp, synthetic construct
  misc_feature 1..373: note = Synthetic construct
  source 1..373: mol_type = other DNA
caggtcaccttgagggagtctggtcctgcgctggtgaaacccacacagaccctcacactgacctgcaccttctctgggttctcactcagcactagtggaatgtgtgtcagctggatccgtcagcccccagggaaggccctggagtggcttgcacgcattgattgggatgatgataaatactacagcacatctctgaagaccaggctcaccatctccaaggacacctccaaaaaccaggtggtcctttcaatgaccaacatggaccctgtggacacagccacgtattactgtgcacggattctggaccctcattactatggttcgggggctattgactactggggccagggaaccctggtcaccgtctcctcag

SEQ ID NO: 3088 - DNA, 373 bp, synthetic construct
  misc_feature 1..373: note = Synthetic construct
  source 1..373: mol_type = other DNA
caggtccaattgattcaatctgggcctgaggtgaagaagccggggtcctcgttgaaggtctcctgcaaggggtctggggtctccgtcatcaacgatgcagtcagctgggtgcgacaggcccccggacaaggccttgagtggatgggcggactcatccctctcttacggatccccaactacgcagcgcacttcaaagacagattgaagatgaccacggacgagtccacaaacaccgccttcatggaactgagcaatctgacttctgacgacacggccacatactactgctcgacagatgcttccaatgattacacctgggggagttatcgcctagaccactggggccagggaaccctggtcaccgtctccccag

SEQ ID NO: 3089 - DNA, 379 bp, synthetic construct
  misc_feature 1..379: note = Synthetic construct
  source 1..379: mol_type = other DNA
caggttcagttggtgcagtctggagctgaggtgcagaagcctggggcctcagtgaaggtctcctgcacggcctctggttacgccttaagtgattatggtgtcagttgggtgcggcaggcccctggacaagcacctgagtggatgggatggatcaacccttacaatggtgacacaaaatattcacagaggctcgagggcagagtcaccatgaccacagacacatccacgaacacagcctacatggagctgaggaggctgagatctgacgacacggccgtttattactgtgcgagagatggtctttattgtagtaggagtggctgtttcgcggactggctcgacctctggggccagggaaccctggtcaccgtctcctcag

SEQ ID NO: 3090 - DNA, 358 bp, synthetic construct
  misc_feature 1..358: note = Synthetic construct
  source 1..358: mol_type = other DNA
gaggtgcagttggtacagtctggaacagaggcgaagaagccgggggagtcgctgaagatctcctgtaaggcttctggatatagttttaccagttactgggtcggctgggtacgccagacgcccgggaaaggcctggagttgatggggatcatctatcctcgtgactccgataccagatacagcccgtccttccgaggccaggtcattatttcagccgacaagtccgtcgagaccgcctacctgcagtggagcagcctgaagtcctcggacactgccatctattactgtgtgagactgactgcggtgactcactactttgactactggggccagggaaccctggtcaacgtctcctcag

SEQ ID NO: 3091 - DNA, 367 bp, synthetic construct
  misc_feature 1..367: note = Synthetic construct
  source 1..367: mol_type = other DNA
gaggtgcagctggtgcagtctggagcagaggtgaaaaagccgggggagtctctgaagatctcctgtaagggttctggatatagttttgcgacatactgggtcggctgggtgcgccagatgcccgggaaaggcctggagtggatgggtatcatctatcctggtgactctgacaccagatatagcccgtccttccaaggccaggtcaccatctcagccgacaagtccatcaacaccgcctacctacagtggagtagcctgaaggcctcggacaccgccatgtattattgtgcgaggccccggaggagtggctacaattatgttggttttgatgtctggggccaagggacactggtcaccgtctcttcag

SEQ ID NO: 3092 - DNA, 361 bp, synthetic construct
  misc_feature 1..361: note = Synthetic construct
  source 1..361: mol_type = other DNA
caggtgcagctgcagccgtggggcgcaagactgttgaagccctcggagaccctgtccctcacgtgcgctgtgtctgctgcgtcattcagtggtaattacgtgacctggattcggcagccccccgggaagggcctggagtggattggggaaatcactcgaagtggaaacaccaactacaccccgtcgctcaagagtcgagtcaccatttcactagacacatccaagaatctggtgtccctgaggttgcggtctgtgaccgccgcggacacggctctttataactgtgcggtggccgcttacccggggagaggtaggcgtctcgacccctggggccagggaaccctggtctccgtctcctcag

SEQ ID NO: 3093 - DNA, 346 bp, synthetic construct
  misc_feature 1..346: note = Synthetic construct
  source 1..346: mol_type = other DNA
gagatgcaggtggtggaatctggaggaggctgggtccggcctggggggtccctgagactctcctgtgcagcctctgggttcagcgtcagtgaccatcacgtgacctgggtccgccaggctccagggaaggcactggagtgggtcggagttatttatgacgatggcagaacattctatgaagactccgtgaagggccgattcatcatatccagacacagttccaagaacatcgtgtatcttcaaatgaacaccctgatacttcaggacgcggccgtctatttttgtgccagaggagttcgatattacgccccctggggccaggggacccgggtcaccgtctcctcag

SEQ ID NO: 3094 - DNA, 367 bp, synthetic construct
  misc_feature 1..367: note = Synthetic construct
  source 1..367: mol_type = other DNA
gaggagcagctggtggagtctgggggaggcttggtacagccagggcggtccctgagactctcctgtacaggttctggattcatttttggtgattatgctgtgacctgggtccgccaggctccaggggaggggctggagtgggtaggtttcattaaaagcaaagcttatggtgggacaacagaatacgccgagtctgtgaaaggcagattcaccatctcaagagatgattccaaaagtatcgcctatctacaaatgaacagcctgaagaccgaggacacagccgtgtattactgtactagtccctcggggagttattaccccctcccctactactggggccagggaaccctggtcaccgtctcctcag

SEQ ID NO: 3095 - DNA, 393 bp, synthetic construct
  misc_feature 1..393: note = Synthetic construct
  source 1..393: mol_type = other DNA
caggtcaccttgagggagtctggtcctgcggtggtgaaacccacacagaccctcacactgacctgcaccgtctctgggttctcagtcagcaccagtggaatgtgtgtgagctggatccgtcagcccccagggaaggccccggagtggctagcacgcattgattgggatgatgataaattttacaagacatctctgaagaccagactcaacatctccaaggacacctccaaaaaccaggtggtccttacaatgatcaacatggaccccgtggacacagccacatattattgtgtacgggtaaaatattacgatgttgtgactggccatcctacggcctaccattcctactacatggacgtctggggcaaagggaccacggtcaccgtctcctca

SEQ ID NO: 3096 - DNA, 369 bp, synthetic construct
  misc_feature 1..369: note = Synthetic construct
  source 1..369: mol_type = other DNA
caggtcaccttgagggagtctggtcctgcgctggtgaaacccacacagaccctcacactgacctgcaccttctctggattctcactcagcactagtggaatgtgtgtgagctggatccgtcagcccccagggaaggccctggaatggcttgcacgcattgattgggatgatgataaatactacagcacatctctgaagaccaggctcaccatctccaaggacacctccagtaaccaggtggtccttacaatgaccaccatggaccctgtggacacagccacgtatttctgtgcacgggcggcgtgtagtggttattactactactacatggacgtctggggcaatggggccacggtcaccgtctcctca

SEQ ID NO: 3097 - DNA, 376 bp, synthetic construct
  misc_feature 1..376: note = Synthetic construct
  source 1..376: mol_type = other DNA
caggtcaccttgaaggagtctggtcctgtgctggtgaaacccacagagaccctcacgctgacctgcaccgtctctgggttctcactcaccaatgctagaatgggtgtgagctggatccgtcagcccccagggaaggccctggagtggcttgcacacattttttcgaatgacgaaaaatcctacagcacatctctgaagagcaggctcaccatctccaaggacccctccaaaagccaggtggtccttaccatgaccaatctggaccctgtggacacagccacatattactgtgcacggatcccacccaacacacagctatgggccaattactactttgactactggggccagggaaccctggtcaccgtctcctcag

SEQ ID NO: 3098 - DNA, 367 bp, synthetic construct
  misc_feature 1..367: note = Synthetic construct
  source 1..367: mol_type = other DNA
caggtcaccttaaaggagtctggtcctgttctggtgaaacccacacagaccctcactctgacctgcgccttctctggtttctcactcacgacatctggaatgtgtgtgagctggatccgtcagcccccagggaaggccctggagtggcttgcacgcatagattgggatgatgataaattttacaactcatctctgaggtccagactcaccatctccaaggacacctccaaaagccaagttgtccttacactgaccaacatggaccctgtggacacaggcacctatttctgtgcacggtcatttctgcctacatccagttattcttttgacttctggggccagggggccctggtgaccgtctcctcag

SEQ ID NO: 3099 - DNA, 390 bp, synthetic construct
  misc_feature 1..390: note = Synthetic construct
  source 1..390: mol_type = other DNA
caggtcaccttgaaggagtctggtcctgtgctggtgaaacccacacagaccctcacactgacctgcaccttctctgggttctcactcaacactagtggaatgtgtgtgagctggatccgtcagcccccagggaaggccctggagtggcttgcacgcattgattgggatgatgataaattctatagcacatctctgaagaccaggctcaccatctccaaggacacctccaaaaaccaggtggtccttacaatgaccaacatggaccctgtggacacagccacgtattactgcgcacggacactggttactaatgtggcagcagctgggaattactactaccactactacatggacgtctggggcaaagggaccacggtcaccgtctcctca

SEQ ID NO: 3100 - DNA, 370 bp, synthetic construct
  misc_feature 1..370: note = Synthetic construct
  source 1..370: mol_type = other DNA
caggtcaccttgaaggagtctggtcctgtgctggtgaaacccacacagaccctcacactgacctgcaccttctctgggttctcactcagcactagtggaatgtgtgtgagctggatccgtcagcccccagggaaggccctggagtggcttgcacgcattgattgggatgatgataaattctacagcacatctctgaagaccaggctcaccatctccaaggacacctccaaaaaccaggtggtccttacaatgaccaacatggaccctgtggacacagccacgtattactgtgcacggataaggtactatggttcggggagttgttactttgactactggggccagggaaccctggtcaccgtctcctcag

SEQ ID NO: 3101 - DNA, 358 bp, synthetic construct
  misc_feature 1..358: note = Synthetic construct
  source 1..358: mol_type = other DNA
caggtcaccttgagggagtctggtcctgcgctggtgaaacccacacagaccctcacactgacctgcaccttctctgggttctcactcagcactagtggaatgtgtgtgagctggatccgtcagcccccagggaaggccctggagtggcttgcacgcattgattgggatgatgataaatactacagtacatctctgaagaccaggctcaccatctccaaggacacctccaaaaaccaggtggtccttacaatgaccaacatggaccctgtggacacagccacgtattactgtacacggcctgagaggaacgggcagatcgactactggggccagggaaccctggtcaccgtctcctcag

SEQ ID NO: 3102 - DNA, 361 bp, synthetic construct
  misc_feature 1..361: note = Synthetic construct
  source 1..361: mol_type = other DNA
caggtcaccttgaaggagtctggtcctgtgctgctgaaacccacagagaccctcacgctgacctgcaccgtctcgggcttctcactcagcgatcctagaatgggtgtgagctggatccgtcagcccccagggaaggccctggagtggcttgcccacattttttcgaatgacgccaagtcctacaggccgtccctgaagagtcggctcaccatctcccaggacacctccaagaaccaggtgttccttaatatgaccaatgtggaccctggggacacagccacttactattgtgcacggaattcgaggcgggagagctttttcgacccctggggccagggaaccctggtcaccgtctcctcag

SEQ ID NO: 3103 - DNA, 382 bp, synthetic construct
  misc_feature 1..382: note = Synthetic construct
  source 1..382: mol_type = other DNA
gaggtgcagctggtggagtcggggggaggcctggcacagccagggcggtcgctgacactctcctgcacgggttccgggttcaccttaagtgatcattctgtgagctgggtccgccaggctccaggcaaggggctggagtgggtaggtttcattagaaacttcaattacggtggaacaccggaatacgccgcgtctgtgcggcgcagattcaccatctcaagagatgattccaaaaacatcgtctatctgcaaatgaacagcctgagaaccgaggacacaggcgtctattactgtgttagagaggccccttcttactatgatgccagtggttatttctactttgactactggggccagggagccctggtcaccgtctcctcag

SEQ ID NO: 3104 - DNA, 370 bp, synthetic construct
  misc_feature 1..370: note = Synthetic construct
  source 1..370: mol_type = other DNA
caggtcaccttgagggagtctggtcctgcgctggtgaaatccacacagaccctcacactgacctgcaccttctctgggttctcactcaccactagaggaatgtgtgtgagctgggtccgtcagcccccagggaagggcctggagtggcttgcacgcattgattgggatgatagtaaatactacagcacatctctgaagaccaggctcaccatctccaaggacacctcaacaaaccgggtggtcctgacaatgaccaacatggaccctgtggacacagccacttattactgtgcacgggaggattttgatagtggaggttatcatgcatttgatatctggggccaagggacaatggtcgccgtctcttcgg

SEQ ID NO: 3105 - DNA, 367 bp, synthetic construct
  misc_feature 1..367: note = Synthetic construct
  source 1..367: mol_type = other DNA
gaggtcgttttgttggagtcgggggggggcttagtgcagccgggcgggtctctgagactctcctgtggaggctctggattcactttttacaactacgccgtgagttgggtccgcctgagtccagggaaggggctggagtgggtctcaggtattagtgccacaggtggcggcgcctattacagagactctgtgagggggcgcttcaccgtgtcccgagacaactccaaaaatacagtgtttctgcaaatggacaacctgggagtcgacgacacgggcatttacttctgtgcgaaggatcgtgacatggccacactttggggacacttccaacactggggccagggcaccgtagtcaccgtctcttcaa

SEQ ID NO: 3106 - DNA, 376 bp, synthetic construct
  misc_feature 1..376: note = Synthetic construct
  source 1..376: mol_type = other DNA
caggtcaccttgagggagtccggtcctgcgctggtgaaacccacacagaccctcacaatgacctgcaccttctctgggttctcattcagtactagtggaatgtctgtgagttggttccgtcagcccccagggaaggccctggagttccttgcacgcattgattgggataatgatagattttacagcacatctctgaaggccaggctcaccgtctccaaggacacctccaaaaaccaggtggtcctcacaatgaccaacatggaccctatagacacagccacgtattactgtgcacggatgcgggtagtcgggtccggttcggggactcgttactttgactactggggccagggatccctggtcaccgtctcctcag

SEQ ID NO: 3107 - DNA, 358 bp, synthetic construct
  misc_feature 1..358: note = Synthetic construct
  source 1..358: mol_type = other DNA
cagatcaccttgaaggagtctggtcctacgctggtgaaacccacacagaccctcacgctgacctgcaccgtctctggggtctcactcgatagtagtggagtggctgtgcactggatccgtcagcccccaggagcggccctggagtggcttgcactcatttattggaatgatgatgagcgctacaggccatctctgaagagcagactcaccatcaccaaggacacctccaaaaaccaggtggtccttacaatgaccaacgtggaccctgtggacacagccacatatttctgtgcacaatcctacgtttcggggagtatcaaatcctggggccagggaatcctggtcaccgtctcctcag

SEQ ID NO: 3108 - DNA, 382 bp, synthetic construct
  misc_feature 1..382: note = Synthetic construct
  source 1..382: mol_type = other DNA
cagatcaccttgcgggagtctggtccaacggtggtgaaacccacacagaccctcacgctgacctgcagcttttctgggttctcactcagttctattggagaggctgtgggctggatccgacagcccccaggaaaggccctggagtggcttggattcatttattggaatgacaataataggaagaggccgtctctggagaccagggtcaccatcaccaaggacaccgccaaaaaccaggtggtctttacactgaccgacatggaccctgtggacacaggcacctattactgtgcacacagaattgcgagtcgtaatggcttgaacctctatattgatgcttttgatttttggggccacgggacaaaggtcactgtctctgcag

SEQ ID NO: 3109 - DNA, 373 bp, synthetic construct
  misc_feature 1..373: note = Synthetic construct
  source 1..373: mol_type = other DNA
cagatcaccttgaaggagtctggtcctacgctggtgaaacccagacagaccctcacgctgacctgcaccttctctgggttctcactcaggactagtggagtgggtgtgggctggatccgtcagcccccaggaaaggccctggagtggctggcactcatttattggaatgatgataagcgctacagcccatctctgaagaccagactcaccatcaccaaggacacctccacaaaccaggtggtccttacattgatcaacatggaccctgtggacacagccacatattactgcgcacacagtcgctattactatactttgggttcctggtactttgactactggggccagggaaccctggtcaccgtctcctcag

SEQ ID NO: 3110 - DNA, 352 bp, synthetic construct
  misc_feature 1..352: note = Synthetic construct
  source 1..352: mol_type = other DNA
cagatcaccttgaaggagtctggtcctacgctggtgaaacccacacagaccctcacgctgacctgcaccttctctgggttctcactcagcactagtggagtgggtgtgggctggatccgtcagcccccaggaaaggccctggagtggcttgcactcatttattggaatgatgataagcgctacagcccatctctgaagagcaggctcaccatcaccaaggacacctccaaaaaccaggtgttccttacaatgaccaacatggaccctgtggacacagccacatattactgtgcacacaatggcctcccctttgactgctggggccagggaaccctggtcaccgtctcctcag

SEQ ID NO: 3111 - DNA, 379 bp, synthetic construct
  misc_feature 1..379: note = Synthetic construct
  source 1..379: mol_type = other DNA
cagatcaccttgaaggagtctggtcctacgctggtgaaacccacacagaccctcacgctgacctgcaccttctctgggttctcactcagcactagtggagtgggtgtgggctggatccgtcagcccccaggaaaggccctggagtggcttgcactcatttactggaatgatgataagcgctacagcccatctctgaagaacagactcagcatcaccaaggacacctccaaaaatcaggtggtccttacaatgaccaacgtggaccctgtggacacagccacatattactgtgcacaccgaggacgatattgtagtggtaccggctgtgggtactactttgactactggggccagggaaccctggtcaccgtctcctcag

SEQ ID NO: 3112 - DNA, 370 bp, synthetic construct
  misc_feature 1..370: note = Synthetic construct
  source 1..370: mol_type = other DNA
cagatcaccttggaggagtctggtcctgcgctggtgaaacccacacagaccctcacgctgacctgttccttgtctggattctcattcaggtctagtgcagtgggtgtgggctggatccgtcagcccccaggaaaggccctggagtggcttgcattcatttatgggaatgacgataagcgatacagtccgtctctgagggccaggctcaccgtcacgaaggacacctccaaaaaccaggtggtctttagaatgataaacatggaccctgtggacacagccacatatttctgtgcattcagcccgcgaggtgtttattatgaatatttctttgaccactggggccagggaaccctggtcaccgtctcctcag

SEQ ID NO: 3113 - DNA, 361 bp, synthetic construct
  misc_feature 1..361: note = Synthetic construct
  source 1..361: mol_type = other DNA
cagatcaccttgaaggagtctggtcctacgctggtgaaacccacacagaccctcacgctgacctgcaccttctctgggtcctcactcggtactagtggagcgggtgtgggctgggtccgtcagaccccaggaaaggccctggagtggcttgcgctcatttatttgactgatgataaacgttacagcccatctctgaagagcaggctcaccatcaccaaggacacctccaaaaaccaggtggtccttacaatgaccaacatggaccctgtggacacagccagatattactgtgtgtacagtatatatgggtcggggatttttgggtactggggccagggaaccctggtcaccgtctcctcag

SEQ ID NO: 3114 - DNA, 382 bp, synthetic construct
  misc_feature 1..382: note = Synthetic construct
  source 1..382: mol_type = other DNA
cagatcaccttgaaggagtctggtcctacgctggtgaaagccacacagaccctcacgctgacctgcaccttctctgggttctcactcagcactcgtggagtgggtgtgggctgggtccgtcagcccccaggaaaggccctggagtggcttgctctcattaattggaatgatgataagtggtacagcccatctttgaagagcaggctcaccatcaccaaggacacctccaaaaaccaggtggtccttacaatgaccaacatggaccctgtggacacagcaacatattactgtgcacacaacgccaaccgtctgtatttctatgatagtggtcccacattctttgactactggggccagggagccctggtcacggtctcctcag

SEQ ID NO: 3115 - DNA, 376 bp, synthetic construct
  misc_feature 1..376: note = Synthetic construct
  source 1..376: mol_type = other DNA
gaggtgcagttgttggagtcggggggagacttggttcagcctgggagatccctgagactctcgtgttcagcctctggcttcacgtttagcagttatgccgtggggtgggtccgccaggctccagggaagggactggagtgggtctcaagtatcagtgggggtggtcggagtattgtttacgctgactccgtgaagggccggttcaccctctccagagacaattccgagaacacgttgtctctgcaaatgaacagcctgagagtcgaggacacggccctatattactgtacaaaattcgcaacatattactatgatactcctggtcatgaacaccttgactcctggggccggggaacccaggtcaccgtctcctcag

SEQ ID NO: 3116 - DNA, 375 bp, synthetic construct
  misc_feature 1..375: note = Synthetic construct
  source 1..375: mol_type = other DNA
gacgcgggcttggaggagtctgggggaggcttggtacagcctggcgggtccctgagactctcctgtgaaggttctggattcatcctcagtagttttgaggttaattgggtccggcaggctcccgggaaggggctggaatggctttcatatattagtagcagtggtaacactgtgaactacgcagattctgtgaagggccgattcaccatctccagagacaacgccaagaattccgtgtatttgcagctgagcagtctgagagtcgaggatacggctgtttattactgtgcgaggacccttataattggaagtacttatgaacctgaatattacatggacgtctggggcaaaggggccacggtcaccgtctcctca

SEQ ID NO: 3117 - DNA, 349 bp, synthetic construct
  misc_feature 1..349: note = Synthetic construct
  source 1..349: mol_type = other DNA
caggtgcagctgcaggagtcgggcccaggactggtgaagccttcggagaccctgtccctcacctgttctgtctctggtggctccatcagtagtttctactgcagctggatccggcagcccccagggaagggactggagtggattgggtatgtcttttacagtgggaccaccgactacaacccctccctcaagagtcgagtcaccatatcagtagacacgtccaagaaccagttctccctggagctgagctctgtgaccgccgcagacacggccatgtattactgtgcgctcttccctagtggcaactacgactactggggccagggaaccctggtcaccgtctcctcag

SEQ ID NO: 3118 - DNA, 406 bp, synthetic construct
  misc_feature 1..406: note = Synthetic construct
  source 1..406: mol_type = other DNA
caggtacagctgcagcagtcaggtccaggactggtgaagccctcgcagaccctctcactcacctgtgccatctccggggacagtgtctctagcaacagtgctgcttggaactggatcaggcagtccccatcgagaggccttgagtggctgggaaggacatactacaggtccaagtggtatattgattatgcagtatctgtgaaaagtcgaataaccatcaacccagacacatccaagaaccagttctccctgcagctgaactctgtgactcccgaggacacggctgtgtattactgtgcaagagatctctgggtagatattatgagtacgtttgggggacgtatcgccatgacggatggggcttttgatatctggggccaagggacaatggtcaccgtctcttcag

SEQ ID NO: 3119 - DNA, 376 bp, synthetic construct
  misc_feature 1..376: note = Synthetic construct
  source 1..376: mol_type = other DNA
caggtgcagctgaaggagtcgggcccaggactggtgaagccttcacagaccctgtccctcacctgcgctgtctctggtggctccgtcagcggtggtgattactcctggaactggatccgacagacaccagggaagggactggagtgggttgggtatatctattacactgggagcacctactacaacccgtccctcaagagtcgaatttccatatcagcagacacggccaagaaccagttctccctggaggtgaagtctgtgaccgccgcggacacggccgtgtattactgcgccagcggatattgtagcggtggaagatgctacggggaattcctccagcactggggccagggcaccctggtcaccgtctcctcag

SEQ ID NO: 3120 - DNA, 379 bp, synthetic construct
  misc_feature 1..379: note = Synthetic construct
  source 1..379: mol_type = other DNA
caggtgcagctgcaggagtcgggcccaggactggtgaagccttcggagaccctgtccctcatctgcactgtctctggtggctccatcagtactcaatactggaactggatccgacagcccccagggaagggactggagtggattgggtacatctcttacagcgggagtaccaattacaatccctccctccagagtcgagccaccatatcactagacacgaccaacaaccagttctccctgaagttgagctctgtgaccgctgcggacacggccgtatattactgtgcgcgagataaaagggaggtattggttttcagagcaggcactggttcgggattcgacccctggggccagggaaccctggtcaccgtctcctcag

SEQ ID NO: 3121 - DNA, 372 bp, synthetic construct
  misc_feature 1..372: note = Synthetic construct
  source 1..372: mol_type = other DNA
caggtgcagctacaacagtggggcgcaggactgctgaagccttcggagaccctgtccctcacctgcgctgtctatggtgagtctttcagtgcttacttctggaactggatccgccaacccccaggggaggggctggagtggattggaaaaatcaatgatggcggaagcacgaagtataacccgtcactcaagagtcgagtcagcatttcagtagacacgtccaagaggcagatctccctcaaagtgatttctgtgaccgccgcggacacggctatatattattgttcgagagggaccaaggggggggtcagcccacactcctactactacgtggacgtctggggcaatgggaccacggtcaccgtctcctca

SEQ ID NO: 3122 - DNA, 372 bp, synthetic construct
  misc_feature 1..372: note = Synthetic construct
  source 1..372: mol_type = other DNA
caggtgcagctacaacagtggggcgcaggactgctgaagctttcggagaccctgtccctcacctgcgctgtctatggtgagtctttcagtgcttacttctggaactggatccgccaacccccaggggaggggctggagtggattggaaaaatcaatgatggcggaagcacgaagtataacccgtcactcaagagtcgagtcagcatttcagtagacacgtccaagaggcagatctccctcaaagtgatttctgtgaccgccgcggacacggctatatattattgttcgagagggaccaaggggggggtcagcccacactcctactactacgtggacgtctggggcaatgggaccacggtcaccgtctcctca

SEQ ID NO: 3123 - DNA, 355 bp, synthetic construct
  misc_feature 1..355: note = Synthetic construct
  source 1..355: mol_type = other DNA
caggtgcagctacagcagtggggcgcaggactgttgaagccttcggagaccctgtccctcacctgcactgtttctggtggctccatcagtacttactactggaactggatccggcaacccccagggaagcgactggagtggattgggcacatctttcacagtgggaccaccagctacgacccctccctcaagagtcgagtctccatgtcagtagacacgtccaggaatcagttctccctgaaactgacctctgtgaccgctgctgacacggccgtttattactgtgcgagagccctgtatgacagcaacccgtttgactactggggccagggaaccctggtcactgtctcctctg

SEQ ID NO: 3124 - DNA, 361 bp, synthetic construct
  misc_feature 1..361: note = Synthetic construct
  source 1..361: mol_type = other DNA
cacgtgcagctgcaagaatcgggcccaggactggtgaagccttcggagaccctgtccctcacctgcactgtctctggtgactccatcactaataactactggaactggatccggcagcccccagggaagggactggagtgggttgggtatatctattatagtgggaccaccaagtacggcccctccctcaagagtcgagtcaccatgtcagtagacacttccaagaaccagttctccctgacactgacctctgtgaccgctgcggacacggccatatattactgtgcgagagcccgccattattatgggtcggggagttttgactcctggagcccgggaaccctggtcaccgtctcctcag

SEQ ID NO: 3125 - DNA, 388 bp, synthetic construct
  misc_feature 1..388: note = Synthetic construct
  source 1..388: mol_type = other DNA
caggtgcagctgcaggagtcgggcccaggactggtgaaggcttcacagaccctgtccctcacctgcactgtctctggtgactccatcagcagtagtacttattactggaactggatccggcagtccgccgggaagggactggagtggattgggcgtatccaaagtggtggaaccaccaactacaatccctccctcaagaggcgagtctccatatcagtagacacataccagaaccaattctccctgaaactgagttctgtgaccgccgcagacacggccgtatattactgtgcgagttcgttaattcggccatattgtgatggtggtgcctgctactcgaattgggtcgacccctggggccagggaaccctggtcaccgtctcctcag

SEQ ID NO: 3126 - DNA, 361 bp, synthetic construct
  misc_feature 1..361: note = Synthetic construct
  source 1..361: mol_type = other DNA
caggtgcagctgcaggagtcgggcccaggactggtgaagccttcacagaccctgtccctcacctgcagtctctctggtgactccatgaacaggagtggttactactggaactggatgcggcagcccgccgggaagggactggagtggattgggcggatctataccaatgggggcaccaattacaacccttccctcacgagtcgagtctccatgtcaatagagacgtccaagaaccagttctccttgaggctgacctctgtgaccgccgcagacacggccgtatatttctgtgcgaggtcgagagatggctacaactccctttatatctggggccaagggacaatggtcaccgtctcttcag

SEQ ID NO: 3127 - DNA, 379 bp, synthetic construct
  misc_feature 1..379: note = Synthetic construct
  source 1..379: mol_type = other DNA
caggtgcaactgcaggagtcgggcccaggactggtgaagtcttcagagaccctgtccctcacttgcactgtctctggtggctccttcagcagtggtagttactactggaactgggtccggcagcccgccgggaaggggctggagtggattgggcgtatctatagaagtggatacactaactacagcccctccctcttgagtcgagtcaccatatcagtggacacgtccaggaaccacctctccctgaggctgagctctgtgaccgccgcagacacggccgtgtattactgtgcgagagagtcgaacgagcttcggagtgcttatcacccctatcactttgactactggggccagggatccctggtcaccgtctcctcag

SEQ ID NO: 3128 - DNA, 376 bp, synthetic construct
  misc_feature 1..376: note = Synthetic construct
  source 1..376: mol_type = other DNA
caggtgcagctgcaggagtcgggcccaggactggtgaagccttcacagaccctctccctcacctgcactgtctctggtggctccatcagcagtggtagttattactggaactgggtccggcagcccgccgggaggggactggagtggattgggcgtatctataccagtgggatcaccgaatacaacccctccctcaagagtcgagtcaccatatcagtagacccgtccaagaaccacttctctttgaagctgacctctgtgaccgcctcagacacggccgtgtattactgtgcgagagattcccacctggttcggggagtcgagtctcccgaatctgactactggggccagggaaccctggtcaccgtctcctcag

SEQ ID NO: 3129 - DNA, 357 bp, synthetic construct
  misc_feature 1..357: note = Synthetic construct
  source 1..357: mol_type = other DNA
caggtgcagctgcaggagtcgggcccaggactggtgaagccctcggagaccctgtcactcacgtgcagtgtctctggaggctccatcagtggctactactggaactgggtgcggcagtccccagggaagggactggagtggattgggtatatccgctacagtggcgccacctactacaacccctccctcaggagtcgagtcaccatgtcagttgacacgtccaagaatcagttctccctgaatctgagttctgtgaccgctgcggacacggccgtctattactgtgcgagacagatgggagattattactactatatggacgtctggggcgaagggaccgcggtcaaggtctcctca

SEQ ID NO: 3130 - DNA, 355 bp, synthetic construct
  misc_feature 1..355: note = Synthetic construct
  source 1..355: mol_type = other DNA
caggtgcagctgcaggcgtcgggcccaggactggtgaagccttcggagaccctgtccctcacctgcagtgtgtcaggtgactccatcactagttactactggaattggatccggcaggccccagggagagaattggagtgggttggatatgtctattacaatgagagcatcaactacaacccctccctcaagagtcgagtcgccatatcagtagacacgtccaggagccagttttccctgaaacttacttctgtgaccgctgcggacacggccgtgtatttctgtgcgagatcaatctggcaaccggaatactttgactactggagccagggaaccctggtcaccgtctcctcag

SEQ ID NO: 3131 - DNA, 364 bp, synthetic construct
  misc_feature 1..364: note = Synthetic construct
  source 1..364: mol_type = other DNA
caggtgaaattgcaggagtcgggcccaggagtggtgaagccttcggagaccctgtccctcacctgcactgtccccggggactccaccagaagttattattggacatggattcggcagcccccagggaagggactggagtggattggacgtatccattatagtggcaacttcaactacaacccctccctcaagagtcgagtctccatatcactggacgagtccaggaaccagttctccctgaagctgacctctatgaccgctgcggacacggccatatattattgtgcggggctgagttattatgacaattttggctctcaaaatgactactggggccagggaaccctggtcaccgtctcctcag

SEQ ID NO: 3132 - DNA, 358 bp, synthetic construct
  misc_feature 1..358: note = Synthetic construct
  source 1..358: mol_type = other DNA
caggtgcagctactcgagtcgggcccaggactggtgaagccttcggggaccctgtccctcgcctgcagtgtctctagtgtctccctgaatgattattattggacctggatccgacagtcccccgggaagggactggaatggattggccatatcttttacagtgggaccaccaattacaactccgccctcaagagtcgagtctccatgtccctggacacgtccaagaaccagttctccctgaggctgacgtctgtgaccgctgcggacacggccgtctactactgttcgacatcaaagtactacgacaccttacacctctcttcctggggccagggagccctggtcaccgtctcctccg

SEQ ID NO: 3133 - DNA, 372 bp, synthetic construct
  misc_feature 1..372: note = Synthetic construct
  source 1..372: mol_type = other DNA
caggtgcagctacagcagtggggcgcaggactgttgaagccttcggagaccctgtccctcacctgcggtgtttatggtgggtccttcagtggttactactggacctggatccgccagcccccagggaaggggctggagtggattggggaaatcaatcatagaggaagcacctacaacccgtccctcaagagtcgagtcaccatatcaatagacacgtccaagaaccaggtctccctgaaattgagctctgtgaacgccgcggacacggctgtgtattactgtgcgagagttattactagggcgagtcctggcacagacgggaggtaccgtatggacgtctggggccaagggaccacggtcaccgtctcctca

SEQ ID NO: 3134 - DNA, 352 bp, synthetic construct
  misc_feature 1..352: note = Synthetic construct
  source 1..352: mol_type = other DNA
caggtgcagctgcaggagtcgggcccaggactggtgaagccttcggagaccctgtccctcacctgcactgtctctggtggctccatcaatacttactactggacctggatccggcagcccccagggaagggactggagtggattgggtatatctattacagtgggagcaccaactacaacccctccctcaagagtcgagtcaccatatcaatagacacgtccaagaaccagttctccctgaagctgagctctgtgaccgctgcggacacggccgtgtattactgtgcgagagagggtccggggcggggccttgactactggggccagggaaccctggtcaccgtctcctcag

SEQ ID NO: 3135 - DNA, 355 bp, synthetic construct
  misc_feature 1..355: note = Synthetic construct
  source 1..355: mol_type = other DNA
caggtgcagctgcaggagtcgggcccaggactggtgaagccttcggagaccctgtccctcacctgcactgtctctggtggctccatcagtagttactactggacctggatccggcagcccccagggaagggactggagtggattgggtatatctattacagtgggagcaccaactacaatccctccctcaagagtcgagtcaccatagcagtagacacgtccaagaaccagttctccctgaagctgacctctgtgaccgctgcggacacggccgtgtattactgtgcgagagattccctccagtatagggcttttgatatctggggccaagggacaatggtcaccgtctcttcag

SEQ ID NO: 3136 - DNA, 384 bp, synthetic construct
  misc_feature 1..384: note = Synthetic construct
  source 1..384: mol_type = other DNA
caggtgcagctgcaggagtcgggcccaggactggtgaagccttcggagaccctgtccctcgcctgcagtgtctctggtgactccatcagtacttactactggacctggatccggcagcccccagggaagggactggagtggattggttatatctattacagtgggagcaccaactacaacccctcactcaagggtcgagtcaccttatcagtagacacgtccaagaaccagttctccctgaagctgagctctgtgaccgctgcggacacggccgtgtattactgtgcgagagggaatttagttcaatattttgactggtcccaagactactactactactacatggacgtctggggcaaagggaccacggtcaccgtctcctca

SEQ ID NO: 3137 - DNA, 366 bp, synthetic construct
  misc_feature 1..366: note = Synthetic construct
  source 1..366: mol_type = other DNA
caggtgcagctgcaggagtcgggccccggactggtgaggccttcggagaccctgtccctcacctgctctgtctctggtgcctccatcaattatttctactggacctggatccggcagcccgccggaaagggactggagtggattgggcgtatctattcgaatgggacctccacctacaattcctccctcaggagtcgagtcaccatgtcagtagacacgtccaagaaccagttctccctgaagctgacctctgtgaccgccgcggacacggccgtctattactgtgcgagagacatgtacaggatctacttctactactactacatggacgtctggggcaaagggaccacggtcaccgtctcctca

SEQ ID NO: 3138 - DNA, 376 bp, synthetic construct
  misc_feature 1..376: note = Synthetic construct
  source 1..376: mol_type = other DNA
caggtgcagctgcaggagtcgggcccaggactggtgaagtcttcacagaccctgtccctcacctgcactgtctccggtgactcaatcagcagtggtttttatcactggacctggatccggcagcccgccggaaagggactggagtggattggtcgtattcctactactgggagtagttcctataacccgtccctcacgagtcgagtcagtctgtcactagataagtccaagaaccagttctccctggatctgacctctgtgaccgcctctgacacgggcgtctattactgcgcgagaaatgttggcatttgcagtagtggcagctgccccccgtttgactcctggggcccgggactcttggtcaccgtctccgcag

SEQ ID NO: 3139 - DNA, 385 bp, synthetic construct
  misc_feature 1..385: note = Synthetic construct
  source 1..385: mol_type = other DNA
caggtgcagctgcaggagtcgggcccaggactggtgaagccttcacagaccctgtccctcacctgcactgtctctggtggctccatcagcagtggtagttactactggacctggatccggcagcccgccgggaagggactggagtggattgggcgtatctataccagtgggagcaccaactataacccctccctcaagagtcgagtcaccatatcagtagacacgtccaagaaccagttctccctgaagctgagctctgtgaccgccgcagacacggccgtgtattactgtgcgagagaggggacgtattactatgatagtagtggttattactacaactggttcgacccctggggccagggaaccctggtcaccgtctcctcag

SEQ ID NO: 3140 - DNA, 367 bp, synthetic construct
  misc_feature 1..367: note = Synthetic construct
  source 1..367: mol_type = other DNA
caggtgcagctgcaggagtcgggcccaggactggtgcagccatcacagaccctgtccctcacctgcactgtctctggtggctccatcagcagtagtaactactactggacctggatccggcagcccgccgggaagggattggagtggattgggcgtatcgctgccagtggcagctcgaattacaacccctccctcaggagtcgagtcaccatatcaatagataggtccaagagccagttctccctgaagttaaactctgtgaccgccgcggacacggccgtgtatttctgtgtgagggaacgtactatggatccgggagtcccctttgactactggggccagggaaccctggtcaccgtctcctcag

SEQ ID NO: 3141 - DNA, 370 bp, synthetic construct
  misc_feature 1..370: note = Synthetic construct
  source 1..370: mol_type = other DNA
caggtgcagctgcaggagtcgggcccaggactggtgaagccttcacagaccctgtccctcacctgcactgtctctgggggctccatcaggggtgataattactactggacctggatccggcagcccgccgggaggggcctggagtggattgggcgcatccatatcagtgggaacaccaactacaattcctccctcaagagtcgagtcaccatatcactagacacgtccaagagccagttctccctgaagctgaggtctctgaccgccgcagacacggccgtctattactgtgcgagagaggtggataaagctctggtcggagagctttttgactcctggggccagggaaccctggttagcgtctcctcag

SEQ ID NO: 3142 - DNA, 364 bp, synthetic construct
  misc_feature 1..364: note = Synthetic construct
  source 1..364: mol_type = other DNA
cgggtgcagctgcaggagtcgggcccaggagtggtgaagtcttcggagaccctgtccctcacctgcagtgtctctggcgcctccatgactagttactactggacctggatccggcagtccccagggaagggactggagtggattggacatatccattacagtggcggcaccaactccaacccctccctccggagtcgagtcaccatatcactagacgagtccgggaaccagttttccctgaggttaaactctgcgaccgctgcggacgcggccatttattactgtgtgggactgtacttttatgacaacagcggcaccgaaaatgactgttggggccagggaaccctggtcaccgtctcctcag

SEQ ID NO: 3143 - DNA, 364 bp, synthetic construct
  misc_feature 1..364: note = Synthetic construct
  source 1..364: mol_type = other DNA
caggtgcagctgcaggagtcgggcccaggactggtgaggcctggggagaccctgtccctcacctgcactgtctctggtggctccatgagtagttactactggacctggatccggcagtccccagggaagggactggagtggattgggcatatctattacaatgggaacacccagtacaacccctccctccagagtcgagtcaccctttcagtagacacgtccaagaaccagttctccctgcagctgagctctgtgaccgccgcagacacggccgtgtattactgtatgcgacgcgtggtggtgattgatactagggattcttttgacatgtggggccaagggacaatggtcaccgtctcttcag

SEQ ID NO: 3144 - DNA, 385 bp, synthetic construct
  misc_feature 1..385: note = Synthetic construct
  source 1..385: mol_type = other DNA
caggtacagctgcaggagtcgggcccagggctggtgaagccttcacagaccctgtccctcacctgcactgtctctggtggctccatcagcagtgggagtcactactggacctggattcggcagcccgccgggaagggactggagtggattggacatatttttatcagtgggagcaccacctacagcccgtcccccaagagccgagtcaccgtatcagcagacacgtccaagaatcagttctccctgaagctgagttctgtgaccgccgcagacacggccgtgtattactgtgcgagagccgaggcgtattacgataatttgcccggttattatgcaagtgcgtttgatatatggggccaagggacaatggtcaccgtctcttcag

SEQ ID NO: 3145 - DNA, 388 bp, synthetic construct
  misc_feature 1..388: note = Synthetic construct
  source 1..388: mol_type = other DNA
caggtgcagctgcaggagtcgggcccgggactggtgaggccctcagagaccctgtccctcatgtgctcggtctcgggtgcctctctcacgaacccgtctttttactggacctggcttcgacagcccgccggggggcggctggagtggattgggcgtttgtatagtagcggcaatggtcactacaatccctccctgaagaatcgggcctccgtgtcactggacacctccaggaattcattttccttgcgcctgacgtcagtgaccgccgcagactcggccatttattactgcgcggcaacgattttggctaattatgatgtcgtttttgggagtgatcgccgctcctttgacttctggagcccgggatcgtgggtcaccatctcctcag

SEQ ID NO: 3146 - DNA, 402 bp, synthetic construct
  misc_feature 1..402: note = Synthetic construct
  source 1..402: mol_type = other DNA
caggtgcagctacagcagtggggcgcaggtctgttgaagccttcggagaccctgtccctcacctgcgctgtctatggtgattccttcagtgattactactggacctgggtccgccagttcccagggaaggggctggagtggattggcgaaatcaatcataatggagccacccacgacaacccgtccctccagagtcgagtcaccatgtcagtggacacgtacaagcagcaattctccctgacactgacgtctctgaccgccgcggacacggctgtctactactgtgcgcgcgtggcagcctatcacaatgcttcggggagtttccgtcctagtgggcgctcctactccttcttctactacatggacgtctggggcaaagggaccacggtcaccgtctcctca

SEQ ID NO: 3147 - DNA, 364 bp, synthetic construct
  misc_feature 1..364: note = Synthetic construct
  source 1..364: mol_type = other DNA
caggtgcagctacagcagtggggcgcaggactgttgaagccttcggagaccctgtccctcacctgcgctgtctctggtgggtccttcagaggtttcttctggacgtggatccgccagcccccaggaaagggcctggagtggattggggaaatcgatcatagtggcagcaccaactacaggccgtcgctcaagagtcgagtcatcatatcaggagacacgtccaagaagcagttctccctgaggctgccctctgtgaccgccgcggacacggctgtatattactgtgcgagaggccgggggccattgagggggggaagctggttcgactcctggggccagggaaccctggtcaccgtctactcag

SEQ ID NO: 3148 - DNA, 373 bp, synthetic construct
  misc_feature 1..373: note = Synthetic construct
  source 1..373: mol_type = other DNA
caggagcaattacagcagtggggcgcaggactgttgaagccttcggagaccctgtccctcacctgcgctgcctatggtgcgtccttcaacatttattcttggacttggatccgccagcccccagggaaggggctggagtggattggggatatcaatcatcgtggaagcaccaactacaacccgtccctcaagagccgagtcaccatatcagcagacacgtccaagaaccagttctccctgacattgaggtctgtgaccgccgcggacacggcgatgtattactgtacgagaggccccagaaagtggctacaacaccaatctcgggggggctttgacatctggggccagggaaccctcgtcagcgtctcctcag

SEQ ID NO: 3149 - DNA, 367 bp, synthetic construct
  misc_feature 1..367: note = Synthetic construct
  source 1..367: mol_type = other DNA
caggtgcagctacagcagtggggcgcaggactgttgaagccttcggagaccctgtccctcacctgcgctgtctatggtgggtccttcagtggttactactggagctggatccgccagcccccagggaaggggctggagtggattggggaaatcaatcatagtggaagcaccaactacaacccgtccctcaagagtcgagtcaccatatcagtagacacgtccaagaaccagttctccctgaagctgagctctgtgaccgccgcggacacggctgtgtattactgtgcgagaaagggaacttatagcagtggctggtacgatgcttttgatatctggggccaagggacaatggtcaccgtctcttcag

SEQ ID NO: 3150 - DNA, 370 bp, synthetic construct
  misc_feature 1..370: note = Synthetic construct
  source 1..370: mol_type = other DNA
caggtgcagctacagcagtggggcgcaggactgttgaagccttcggagaccctgtccctcacctgcgctgtctatggtgggtccttcagtggttactactggagctggatccgccagcccccagggaaggggctggagtggattggggaaatcaatcatagtggaagcaccaactacaacccgtccctcaagagtcgagtcaccatatcagtagacacgtccaagaaccagttctccctgaagctgagctctgtgaccgccgcggacacggctgtgtattactgtgcgagaggcgcccccaccgttcggggagttattaccaactggttcgacccctggggccagggaaccctggtcaccgtctcctcag

SEQ ID NO: 3151 - DNA, 381 bp, synthetic construct
  misc_feature 1..381: note = Synthetic construct
  source 1..381: mol_type = other DNA
caggtgcagctacagcagtggggcgcaggactgttgaagccttcggagaccctgtccctcacctgcgctgtctatggtgggtccttcagtggttactactggagctggatccgccagcccccagggaaggggctggagtggattggggaaatcaatcatagtggaagcaccaactacaacccgtccctcaagagtcgagtcaccatatcagtagacacgtccaagaaccagttctccctgaagctgagctctgtgaccgccgcggacacggctgtgtattactgtgcgagaggcgtaagatggatggttcggggcggccggtcttactactactactacatggacgtctggggcaaagggaccacggtcaccgtctcctca

SEQ ID NO: 3152 - DNA, 375 bp, synthetic construct
  misc_feature 1..375: note = Synthetic construct
  source 1..375: mol_type = other DNA
caggtgcagctacagcagtggggcgcaggactgttgaagccttcggagaccctgtccctcacctgcgctgtctatggtgggtccttcagtggttactactggagctggatccgccagcccccagggaaggggctggagtggattggggaaatcaatcatagtggaagcaccaactacagcccgtccctcaagagtcgagtcaccatatcagtagacacgtccaaaaaccagttctccctgaagctgagctctgtgaccgccgcggacacggctgtgtattactgtgcgagaggctactatagggtgtggaattactatggttcgggcaactacacggacgtctggggcaaagggaccacggtcaccgtctcctca

SEQ ID NO: 3153 - DNA, 373 bp, synthetic construct
  misc_feature 1..373: note = Synthetic construct
  source 1..373: mol_type = other DNA
caggtgcagctacagcagtggggcgcaggactgttgaagccttcggagaccctgtccctcacctgcgctgtctatggtgggtccttcagtggttactactggagctggatccgccagcccccagggaaggggctggagtggattggggaaatcaatcatagtggaagcaccaactacaacccgtccctcaagagtcgagtcaccatatcagtagacacgtccaagaaccagttctccctgaagctgagctctgtgaccgccgcggacacggctgtgtattactgtgcgagaggctgggcccactatagggttcggggagctaagcgttattttgactactggggccagggaaccctggtcaccgtctcctcag

SEQ ID NO: 3154 - DNA, 370 bp, synthetic construct
  misc_feature 1..370: note = Synthetic construct
  source 1..370: mol_type = other DNA
caggtgcagctacagcagtggggcgcaggactgttgaagccttcggagaccctgtccctcacctgcgctgtctatggtgggtccttcagtggttactactggagctggatccgccagcccccagggaaggggctggagtggattggggaaatcaatcatagtggaagcaccaactacaacccgtccctcaagagtcgagtcaccatatcagtagacacgtccaagaaccagttctccctgaagctgagctctgtgaccgccgcggacacggctgtgtattactgtgcgagagggggccggattgtagtagtaccagctgctagctactttgactactggggccagggaaccctggtcaccgtctcctcag

SEQ ID NO: 3155 - DNA, 361 bp, synthetic construct
  misc_feature 1..361: note = Synthetic construct
  source 1..361: mol_type = other DNA
caggtgcagctacagcagtggggcgcaggactgttgaagccttcggagaccctgtccctcacctgcgctgtctatggtgggtccttcagtggttactactggagctggatccgccagcccccagggaaggggctggagtggattggggaaatcaatcatagtggaagcaccaactacaacccgtccctcaagagtcgagtcaccatatcactagacacgtccaagaaccagttctccctgaagctgagctctgtgaccgccgcggacacggctgtgtattactgtgcgagattatcatttggttcgggggatgatgcttttgatatctggggccaagggacaatggtcaccgtctcttcag

SEQ ID NO: 3156 - DNA, 375 bp, synthetic construct
  misc_feature 1..375: note = Synthetic construct
  source 1..375: mol_type = other DNA
caggtgcaggtacagcagtggggcgcaggactgttgaagccttcggagaccctgtccctcacctgcgctgtctatggtgggtccttcagtggttactactggagctggatccgccagcccccagggaaggggctggagtggattggggaaatcaatcatagtggaggcaccaactacatcccgtccctcaagagtcgagtcaccatatcagtagacacgtccaagaaccagttctccctgaagctgagctctgtgaccgccgcggacacggctgtgtattactgtacgagaggccttagagcagtggttggtacttcctacaactactactacatggacgtctggggcaaagggaccacggtcaccgtctcctca

SEQ ID NO: 3157 - DNA, 396 bp, synthetic construct
  misc_feature 1..396: note = Synthetic construct
  source 1..396: mol_type = other DNA
caggtgcagctgcagcagtggggcgcaggcctgttgaagccttcggagaccctgtcactcacctgcgctgtctatcgtgggtcgttaagtgctcactattggagctggatccgccagcccccagggaaggggctggagtgggtcggggatatcagtcatggtggaggcaccaactacaatccgtccctcaagaatcgagtcaccatctcactagacaagtccaagaaccaattctccctcaaaatgacctctgtgaccgccgcggacacggctatctattactgtgcgagagtccttggggaggcggaatccgattatttgactggttctcatcttcgttactactactactacatggacgtctggggcacagggaccacggtcaccgtctcctca

SEQ ID NO: 3158 - DNA, 361 bp, synthetic construct
  misc_feature 1..361: note = Synthetic construct
  source 1..361: mol_type = other DNA
caggtgcggcttcagcagtggggcgcaggactgttgaagccttcggagaccctgtccctcacctgcgctgtctatggtgggtccttcaatgattactactggagctggatccgccagcccccaggtaaggggctggagtggattggggaaatcaatcaaagtggaagcaccaaatacaacccgtccctcaagagtcgagtcaccacttcagtagacacgtctaagaatcaattctccctgaaactgaggtctctgaccgccgcggacacggctgtttattactgtgcgagaggccttgggaagcagtggttcagctgcttcgacccctggagccagggaaccctggtcatcgtctcctcag

SEQ ID NO: 3159 - DNA, 352 bp, synthetic construct
  misc_feature 1..352: note = Synthetic construct
  source 1..352: mol_type = other DNA
caggtgcagctacagcagtggggcccaggactgttgaagccttcggagaccctgtccctcacctgcgctgtttcttatgggtccttcagtggttactcctggagctggatccgccagccccccgggaaggggctggagtggattggggaaatcaatcatagtggaagcaccaactacaacccgtccctccagagtcgagtcaccatatcagcagacacgtccaagagccaattctccctgaatctgaggtctgtgaccgccgcggacacggctgtttattactgtgcgagagttactaacagaggctggtatagggcctggggccagggaaccctggtcaccgtctcctcag

SEQ ID NO: 3160 - DNA, 385 bp, synthetic construct
  misc_feature 1..385: note = Synthetic construct
  source 1..385: mol_type = other DNA
caagtacagctacaacagtggggcgcaggactgttgaagccttcggagaccctgtctctcatctgtgctgtctatcgtgggtccttcagagatcactactggagctggatccgccagtccccagggaaggggctggagtggattggggaaatcaatcatactggaagcaccaactccaacccgtccctcaagagtcgagtcaccatgtcagtagacacgtccaagaaccagttctccctgaagctgagctctgtgaccgccgcggacacggctgtctattactgtgcgagagggggagcctattccgatttttggagtggctttccaaatgcccgagccttctttgactcctggggccagggaaccttggtcaccgtctcctcag

SEQ ID NO: 3161 - DNA, 378 bp, synthetic construct
  misc_feature 1..378: note = Synthetic construct
  source 1..378: mol_type = other DNA
caggtgcagctccaacaatggggcgcaagactgttgaagccttcggagaccctgtccctcacctgcgctgtctatggtgggtccttcagtggttacttctggagctggatccgccagtccccagggaaggggctggagtggattggggaaatcaatcatagtggaaccaccaattacaacccgtccctcaagagtcgagtcaccatttcagtcgacacgtccaagaatcagttctccctgaagttgacttctgtcaccgccgcggacacggctgtttattattgttcgagaggaaatgccgggatagccggtcatatttttcacttcctctactacatcgacgtctggggcgatgggaccacggtcaccgtctcctca

SEQ ID NO: 3162 - DNA, 357 bp, synthetic construct
  misc_feature 1..357: note = Synthetic construct
  source 1..357: mol_type = other DNA
caggtgcagctgcaggagtcgggcccaggactggtgaagccttcggagaccctgtccctcacctgcactgtctctggtggctccatcagcaacttctactggagctggatccggcaagccccagggaagggactggagtggattggatatatctataacactgggaccaccaactacaacccctccctcaagagtcgagtcaccatttcattagacacgtccaggaaccagttctccctgaggctgaggtctgtgaccgctgcggacacggccgtctattactgtgcgagagatggcccgggaaagaactacttcttggacgtctggggcagagggaccacggtcatcgtctcctca

SEQ ID NO: 3163 - DNA, 367 bp, synthetic construct
  misc_feature 1..367: note = Synthetic construct
  source 1..367: mol_type = other DNA
caggtgcagctgcaggagtcgggcccaggactggtgaagccttcacagaccctgttcctcacctgcgatgtctctggtgactccatcagcagtggtggttactcctggagctggatccggcagccaccagggaagggactggagtggattgggtatatctcttatactgggagcaccgactacaacccgtccctcaagagtcgagttaccatatcaggagacacgtccaggaaccagttctccctgaagctgacctctgtgaccgccgcggacacggccgtgtattactgtgccagagtctacaatggagatggcaacaaccccattgactactggggccagggaaccctggtcaccgtctcctcag

SEQ ID NO: 3164 - DNA, 384 bp, synthetic construct
  misc_feature 1..384: note = Synthetic construct
  source 1..384: mol_type = other DNA
cagctgcagctgcaggagtccggctcaggactggtgaagccttcacagaccctgtccctcacctgcgctgtctctggtggctccatcagcagtggtggttactcctggagctggatccggcagccaccagggaagggcctggagtggattgggtacatctatcatagtgggagcacctactacaacccgtccctcaagagtcgagtcaccatatcagtagacaggtccaagaaccagttctccctgaagctgagctctgtgaccgccgcggacacggccgtgtattattgtgccagagggtccctggatgatgatagtagtggttattactcctactactatatggacgtctggggcaaagggaccacggtcaccgtctcctca

SEQ ID NO: 3165 - DNA, 370 bp, synthetic construct
  misc_feature 1..370: note = Synthetic construct
  source 1..370: mol_type = other DNA
caggtgcagctgcaggagtcgggcccgggactggtgaagccttcacagaccctgtccctcacctgctctgtctctggtgactccgtcaacagtggtgcttactcctggagctggatccggcagccaccagggcagggactggagtggattggagatatcttttacagtgggagtgcctattacaacccgtccctcaagagtcgatttaccatgtcaatagacacggccaagaatcagttctccctgaacctgaactctgtgaccgccgcggacacggccgtctattactgtgccagagccaagggagatggctacattgggggcatttttgactcctggggccagggaacccgggtcaccgtctcctcgg

SEQ ID NO: 3166 - DNA, 370 bp, synthetic construct
  misc_feature 1..370: note = Synthetic construct
  source 1..370: mol_type = other DNA
caggtgcacctgcaggagtcgggcccaggactggtgaagccctcggcgaccctgtccctcacctgcaatgtctctggtggctccatcaggagtcactactggagctggatccggcagcccccagggaagggactggaatggattggatatgtttattatactgggaccaccgactacagcccctccctcaagagtcgagccaccatatcaattgacccatcgaagagtcagtttttcctgaagttgaggtctgtgaccgccgctgacacggccgtatattactgtgcgagactgaattactatgatcgtaatggtcattactattactttgactactggggccaaggaggcctggtgaccgtcccctcag

SEQ ID NO: 3167 - DNA, 364 bp, synthetic construct
  misc_feature 1..364: note = Synthetic construct
  source 1..364: mol_type = other DNA
caggtgcagctgcaggagtcgggcccaggactggtgaagccttcggagaccctgtccctcacctgcactgtctctggtgactccatcagtggttaccactggagctggatccggcagcccccagggaagggactggagtggatcgggtatatctattacagtgggagcaccaagtacaacccctccctcaagagtcgaggcaccatatcagtagacacgtccaaaaaccagttctccctgaagctgagctctgtgaccgctgcggacacggccgtgtatttctgtgcgagaaacttcggtgactacgcctacccctacttctttgacttctggggccagggaaccctggtcaccgtctcctcag

SEQ ID NO: 3168 - DNA, 366 bp, synthetic construct
  misc_feature 1..366: note = Synthetic construct
  source 1..366: mol_type = other DNA
caggtgcagctgcaggagtcgggcccaggactggtgaagccttcggagaccctgtctctcacctgcagtgtctctggtggctccaccaggagttactactggagctggatccggcagcccccagggaagggactggagtggattggatatagttataacaatgagagaacgaagtacgacccctccctcacgagtcgagtcaccatatcagtggacacgtccaagaaccagattaccctgaacctgacctctgtgaccgccgcggacacggccgtgtattattgtgcgagaggtattattttgagtgggtcccccctctactacctggacgtctggggcaaagggaccacggtcaccgtctcctca

SEQ ID NO: 3169 - DNA, 354 bp, synthetic construct
  misc_feature 1..354: note = Synthetic construct
  source 1..354: mol_type = other DNA
caggtgcacctgcaggagtcgggcccaggactggtgaagccttcggagaccctgtccctcacctgcactgtctctgatggctccatcaatagttactactggagctggatccggcagcccccagggaagggactggagtggattgggtatatctattacagtgggagcgccaactacaacccctccctcaagagtcgagtcaccatttcattagacacgtccaacaaccagttctccctgaagctgagctctgtgaccgccgcagacacggccgtttattactgtgcgagattcgcccgactagactactacatggacgtctggggcaaagggaccacggtcaccgtctcctca

SEQ ID NO: 3170 - DNA, 381 bp, synthetic construct
  misc_feature 1..381: note = Synthetic construct
  source 1..381: mol_type = other DNA
caggtgcagctgcaggagtcgggcccaggactggtgaagccttcggagaccctgtccctcacctgcactgtctctggtggctccatcagtagttactactggagctggatccggcagcccccagggaagggactggagtggattgggtatatctattacagtgggagcaccaactacaacccctccctcaagagtcgagtcaccatatcagtagacacgtccaagaaccagttctccctgaagctgagctctgtgaccgccgcagacacggccgtgtattactgtgcccgactttactggggttgtactaatggtgtatgctcctactactactactacatggacgtctggggcaaagggaccacggtcaccgtctcctca

SEQ ID NO: 3171 - DNA, 375 bp, synthetic construct
  misc_feature 1..375: note = Synthetic construct
  source 1..375: mol_type = other DNA
caggtgcagctgcaggagtcgggcccaggactggtgaagccttcggagaccctgtccctcacctgcactgtctctggtggctccatcagtagttactactggagctggatccggcagcccccagggaagggactggagtggattgggtatatctattacagtgggagcaccaactacaacccctccctcaagagtcgagtcaccatatcagtagacacgtccaagaaccagttctccctgaagctgagctctgtgaccgctgcggacacggccgtgtattactgtgcgagaatcccgaccccgaatgtgggatatacagctgggtactactacatggacgtctggggcaaagggaccacggtcaccgtctcctca

SEQ ID NO: 3172 - DNA, 358 bp, synthetic construct
  misc_feature 1..358: note = Synthetic construct
  source 1..358: mol_type = other DNA
caggtgcagctgcaggagtcgggcccaggactggtgaagccttcggagaccctgtccctcacctgcactgtctctggtggctccatcagtagttactactggagctggatccggcagcccccagggaagggactggagtggattgggtatatctattacagtgggagcaccgactacaacccctccctcaagagtcgagtcaccatatcagtagacacgtccaagaaccagttctccctgaagctgagctctgtgaccgctgcggacacggccgtgtattactgtgcgagagaaaggcatgactacgtaggagcttttgatatctggggccaagggacaatggtcaccgtctcttcag

SEQ ID NO: 3173 - DNA, 373 bp, synthetic construct
  misc_feature 1..373: note = Synthetic construct
  source 1..373: mol_type = other DNA
caggtgcagctgcaggagtcgggcccaggactggtgaagccttcggagaccctgtccctcacctgcactgtctctggtggctccatcagtagttactactggagctggatccggcagcccccagggaagggactggagtggattgggtatatctattacagtgggagcaccaactacaacccctccctcaagagtcgagtcaccatatcagtagacacgtccaagaaccagttctccctgaagctgagctctgtgaccgctgcggacacggccgtgtattactgtgcgagagaaggaagcagcagctggtacacgacctggggatgggcttttgatatctggggccaagggacaatggtcaccgtctcttcag

SEQ ID NO: 3174 - DNA, 358 bp, synthetic construct
  misc_feature 1..358: note = Synthetic construct
  source 1..358: mol_type = other DNA
caggtgcagctgcaggagtcgggcccaggactggtgaagccttcggagaccctgtccctcacctgcactgtctctggtggctccatcaatacttactactggagctggatccggcagcccccagggaagggactggagtggattgggtatatctattacagtgggagttccaactataacccctccctcaagagtcgagtcaccatatcagtagacacgtccaagaaccagttctccctgaagctgagctctgtgaccgctgcggacacggccgtgtattactgtgcgagagataatcagattactaaggatgcttttgatatctggggccaagggacaatggtcaccgtctcttcag

SEQ ID NO: 3175 - DNA, 369 bp, synthetic construct
  misc_feature 1..369: note = Synthetic construct
  source 1..369: mol_type = other DNA
caggtgcagctgcaggagtcgggcccaggactggtgaagccttcggagaccctgtccctcacctgcactgtctctggtggctccatcagtagttactactggagctggatccggcagcccccagggaagggactggagtggattgggtatatctattacagtgggagcaccaactacaacccctccctcaagagtcgagtcaccatatcagtagacacgtccaagaaccagttctccctgaagctgagctctgtgaccgctgcggacacggccgtgtattactgtgcgagagatcggagctatagtggctactactactactactacatggacgtctggggcaaagggaccacggtcaccgtctcctca

SEQ ID NO: 3176 - DNA, 349 bp, synthetic construct
  misc_feature 1..349: note = Synthetic construct
  source 1..349: mol_type = other DNA
caggtgcagctgcaggagtcgggcccaggactggtgaagccttcggagaccctgtccctcacctgcactgtctctggtggctccatcagtagttactactggagctggatccggcagcccccagggaagggactggagtggattgggtatatctattacagtgggagcaccaactacaacccctccctcaagagtcgagtcaccatatcagtagacacgtccaagaaccagttctccctgaagctgagctctgtgaccgctgcggacacggccgtgtattactgtgcgagcggtattggtgactactttgactactggggccagggaaccctggtcaccgtctcctcag

SEQ ID NO: 3177 - DNA, 373 bp, synthetic construct
  misc_feature 1..373: note = Synthetic construct
  source 1..373: mol_type = other DNA
caggtgcagctgcaggagtcgggcccaggactggtgaagccttcggagaccctgtccctcacctgcactgtctctggtggctccatcagtggttactactggagctggatccggcagccccccgggaagggactggagtggattgggaatatctactacagtgggagcaccaactacaacccctccctcaagaatcgattcaccatatcagtagacacgtccaagaaccagttctccctgaaggtgacctctgtgaccgccgcagacacggccgtgtattactgtgcgagacgacattcggagcagtggctgttaaggggccctggtgcttttgatatctggggccaagggacaatggtcaccgtctcttcag

SEQ ID NO: 3178 - DNA, 361 bp, synthetic construct
  misc_feature 1..361: note = Synthetic construct
  source 1..361: mol_type = other DNA
caggtgcagctgcaggagtcgggcccgggactggtgaagccttcggagaccctgtccctcacctgcactgtctctggtggctccatcagtagttactactggagctggatccggcagccccccgggaagggactggagtggattgggtatatctattacagtgggggcaccaagtacaacccctccctcaagagtcgagtcaccatatcagtagacacgtccaagaaccagttctccctgattctgagctctgtgaccgctgcggacacggccgtgtattattgtgcgagagggtcggaatggcgtctctattactactttgactactggggccagggaaccctgctcaccgtctcctcag

SEQ ID NO: 3179 - DNA, 364 bp, synthetic construct
  misc_feature 1..364: note = Synthetic construct
  source 1..364: mol_type = other DNA
caggtgcagctgcaggagtcgggcccaggactggtgaagccttcggagaccctgtccctcacctgcactgtctctggtgactccatcagtaattactactggagctggatccggcagccccctgggaagggactggagtggattgggtatatctataacagtgcgaacaccaactacaacccctccctcaagagtcgagtcaccatttcagtagacacgtccaaaaaccagttctccctgaggctgacctctgtgaccgctgcggacacggccgtgtattattgtgcgagacgggtggtggtagatcctactctcgggtcatttgatatctggggccaagggacattggtcaccgtctcctcag

SEQ ID NO: 3180 - DNA, 355 bp, synthetic construct
  misc_feature 1..355: note = Synthetic construct
  source 1..355: mol_type = other DNA
caggtgcaactactggagtcgggcccaggactggtgaagccttcacagaccctgtccctcacctgcaatgtctctggtggctccatcaacagcggtaattactactggagctggatccggcagcccgccgggaagggactggagtggattggacgaatcgaaaccagtgggagcaccaactacaatccctccctcaagagtcgagtcaccatatcagtagacatgtccaagaaccagttctccctgaagatgagctctgtgaccgccgaagacacggccgtgtattattgtgcgagagatcgcaggggatacagcttttactggggccagggaaccctggtcaccgtctcctcag

SEQ ID NO: 3181 - DNA, 382 bp, synthetic construct
  misc_feature 1..382: note = Synthetic construct
  source 1..382: mol_type = other DNA
caggtgcagctgcaggagtcggggccaggactggtgaagccttcacagaccctgtccctcacttgcactgtctctggtgactccgtcagcagtggtacttactcctggagctggatccggcagcccgccgggaagggactggagtggattgggcgcatgtacaccagtgggcgcaccgaccacaacccctccctcaagaggggagtcaccatatcagtggacacgtccaagaaccagttctccttgaggctgacttctgtgaccgccgcagacacggccgtctattactgtgcgagagagttttattactctgatagtaatgattttccatttcatgtttttgatatctggggccacgggacactggtcaccgtctcttcag

SEQ ID NO: 3182 - DNA, 358 bp, synthetic construct
  misc_feature 1..358: note = Synthetic construct
  source 1..358: mol_type = other DNA
caggtgcagctgcaggagtcgggcccaggactggtgaagccttcacagaccctgtccctcacctgcactgtctctggtggctccatcagcagtggcagttactactggagctggatccggcagcccgccgggaagggactggagtggattgggcgtatctataccagtgagagcaccaactacaacccctccctcaagagtcgagtcaccatatcagtagacacgtccaagaaccagttctccctgaggctgacctctgtgaccgccgcagacacggccgtgtattactgtgcgagagagggtataggcggagctactgatatctggggccaagggacaatggtcaccgtctcttcag

SEQ ID NO: 3183 - DNA, 376 bp, synthetic construct
  misc_feature 1..376: note = Synthetic construct
  source 1..376: mol_type = other DNA
caggtgcagctgcaggagtcgggcccaggactggtgaagccttcacagaccctgtccctcacctgcactgtctctggtggctccatcagaagtgatagttcctactggagctggatccggcagcccgccgggaagggactggagtggattgggcgtatctataccagtgggagcaccaactacaacccctccctcaagagtcgagtcaccatatcaatagacacgtccaagaaccagttctccctgaagatgagctctgtgaccgccgcagacacggccgtgtattactgtgcgagagatctcggctacggtggtaactccccccactggtacttcgatctctggggccgtggcaccctggtcactgtctcctcag

SEQ ID NO: 3184 - DNA, 367 bp, synthetic construct
  misc_feature 1..367: note = Synthetic construct
  source 1..367: mol_type = other DNA
caggtgcagctgcaggagtcgggcccaggactggtgaagccttcacagaccctgtccctcacctgcactgtctctggtggctccatcagcagtggtagttactactggagctggatccggcagcccgccgggaagggactggagtggattgggcgtatctataccagtgggagcaccaactacaacccctccctcaagagtcgagtcaccatatcagtagacacgtccaagaaccacttctccctgaagctgagctctgtgaccgccgcagacacggccgtctattactgtgcgagagcggactacggtgactacgaggactactttgactactggggccagggaaccctggtcaccgtctcctcag

SEQ ID NO: 3185 - DNA, 358 bp, synthetic construct
  misc_feature 1..358: note = Synthetic construct
  source 1..358: mol_type = other DNA
caggtgcagctgcaggagtcgggcccaggactggtgaagccttcacagaccctgtccctcacctgcactgtctctggtggctccatcagcagtggtagttactactggagctggatccggcagcccgccgggaagggactggagtggattgggcgtatctataccagtgggagcaccaactacaacccctccctcaagagtcgagtcaccatatcagtagacacgtccaagaaccagttctccctgaagctgagctctgtgaccgccgcagacacggccgtgtattactgtgcgagaggcggcggaggggggtggttcgacccctggggccagggaaccctggtcaccgtctcctcag

SEQ ID NO: 3186 - DNA, 373 bp, synthetic construct
  misc_feature 1..373: note = Synthetic construct
  source 1..373: mol_type = other DNA
caggtgcagctgcaggagtcgggcccaggactggtgaagccttcacagaccctgtccctcacctgcactgtctctggtggctccatcagcagtggtagttactactggagctggatccggcagcccgccgggaagggactggagtggattgggcgtatctataccagtgggagcaccaactacaacccctccctcaagagtcgagtcaccatatcagtagacacgtccaagaaccagttctccctgaagctgagctctgtgaccgccgcagacacggccgtgtattactgtgcgagagggggactctatggttcggggagagtaaactggttcgacccctggggccagggaaccctggtcaccgtctcctcag

SEQ ID NO: 3187 - DNA, 361 bp, synthetic construct
  misc_feature 1..361: note = Synthetic construct
  source 1..361: mol_type = other DNA
caggtgcagctgcaggagtcgggcccaggactggtgaagccttcacagaccctgtccctcacctgcactgtctctggtggctccatcagcagtggtagttactactggagctggatccggcagcccgccgggaagggactggagtggattgggcgtatctataccagtgggagcaccaactacaacccctccctcaagagtcgagtcaccatatcagtagacacgtccaagaaccagttctccctgaagctgagctctgtgaccgccgcagacacggccgtgtattactgtgcgagatcccgttcgaggcagcagccaaatgactactggggccagggaaccctggtcaccgtctcctcag

SEQ ID NO: 3188 - DNA, 361 bp, synthetic construct
  misc_feature 1..361: note = Synthetic construct
  source 1..361: mol_type = other DNA
caggtgcagctgcaggagtcgggcccaggactggtgaagccttcggagaccctgtccctcacctgcactgtctctggtggctccatcagtacttactactggagctggatccggcagcccgccgggaagggactggagtggattgggcgtatctctaccagtgggagcaccaactacaacccctccctcaagagtcgagtcaccatgtcagtagacacgtccaagaaccagttctccctgaagctgagctctgtgaccgccgcggacacggccgtgtatttctgtgcgagagatcgtaagggtagtgacggtgatagcatggacgtctggggcaaagggaccacggtcaccgtctcctcag

SEQ ID NO: 3189 - DNA, 376 bp, synthetic construct
  misc_feature 1..376: note = Synthetic construct
  source 1..376: mol_type = other DNA
caggtgcagctgcaggagtcgggcccaggactggtgaagccttcggagaccctgtccctcacctgcagtgtctctggtggttccataagaaattattactggagctggatccggcagcccgccgggaagggtctggagtggattggccgtatctacaccagtgggaccaccgactacaacccctccctttcaaatcgagtcaccatgtcggtggacacgtccaagaatcagttctccctgacggtggactctgtgaccgcagcagacacggccgtctatttctgtgcgagggcccgacaccgatactacgattctttgactggccaggggtcctttgattactggggccagggaatactggtcaccgtctcctcag

SEQ ID NO: 3190 - DNA, 355 bp, synthetic construct
  misc_feature 1..355: note = Synthetic construct
  source 1..355: mol_type = other DNA
caagtgcagctgcaggagtcgggcccaggactggtaaagccttcggagaccctgtccgtcacctgcactgtctctggtggctccatcagtagttactactggagctggatccggcagtccccagggaagggactggagtggattgggtatatcaattacagtgggaccaccaactacaacccctccctcaagagtcgagtcaccatatcagtagacacgtccaacaataagttctccctgaagctgagctctgtgaccgctgcggacacggccgtttattattgtgtgagagggggagatatagagactaccatggagttctggggccagggaaccctggtcaccgtctcctcag

SEQ ID NO: 3191 - DNA, 366 bp, synthetic construct
  misc_feature 1..366: note = Synthetic construct
  source 1..366: mol_type = other DNA
caggtgcagctacaggagtcgggcccaggactggtgaagccttcggagaccctgtccctcacctgcaatgtctctggcggccccagcgatagttcctactggagctggatccggcagtccccggggaggggactggagtggatgggatatgtccatcacactgggagcaccaactacaacccctccctcaagagtcgagtcaccatttcagtggactcgtccaagagccagttgtccctgaggctgagctctgtgaccgctgaggacacggccatatattactgtgcgcgaaatgggcctaagtggaacaattactactactacatggacgtctggggcgaagggaccacggtcaccgtctcctca

SEQ ID NO: 3192 - DNA, 361 bp, synthetic construct
  misc_feature 1..361: note = Synthetic construct
  source 1..361: mol_type = other DNA
caggtgcagctgcaggagtcgggcccaggactggtgaaaccttcggagaccctgtccctcacctgcactgtctctggtgcctccatcagtcgttactattggagctggattcggcagcccccagggaagggactggagtggattggaattgtctactatactgggagcaccacctacaacccctccctcaagagtcgagtcaccatctcaatagacacgtccaagaatcagttctccctgaacctggggtctgtgaccgccgcggacagggccgtgtattattgtgtgaggacccttagagatggcttcaattcctggttcgacccctggggcctgggaacccttgtcaccgtctcctcag

SEQ ID NO: 3193 - DNA, 363 bp, synthetic construct
  misc_feature 1..363: note = Synthetic construct
  source 1..363: mol_type = other DNA
caggtgcagctacagcagtggggcggaggactcttgaagccttcggagaccctgtccctcacctgcggtgtctatggtggctccttcagtgattacgactggagctgggtccgccagaccccagggaaggggctggagtggattggagagatcaatcatactggaaagtccaactacaacccgtccctcgagggtcgcgtctccctttcaatagacatgtcaaagaaacagtcgtcactaaaactgacctctgtgaccgccgcggacacggctatttattattgtgcgagaggcccacccatagacgactactactactacatggacgtctggggcaaagggaccacggtcaccgtctcctca

SEQ ID NO: 3194 - DNA, 382 bp, synthetic construct
  misc_feature 1..382: note = Synthetic construct
  source 1..382: mol_type = other DNA
ctggtgcagctgcaggagtcgggcccaggactggtgaagccttcggagaccctgtccctcacctgcactgtctctggtggctccatcagtacctactactggagctgggtccggcagcccccaggaaagggactggaatacattgggtatatctattacagtgggagcaccaattacaacccctccctcaagagtcgagtcaccatatcagtagacacgtccaagaaccagttctccctgaatatgagctctgtttccgccgcagacacggccgtttattattgtactagacatctgatgaattttgatttctggagtggctattatacggtgaacgcttttgatatctggggccaagggacaatggtcaccgtctcttcag

SEQ ID NO: 3195 - DNA, 364 bp, synthetic construct
  misc_feature 1..364: note = Synthetic construct
  source 1..364: mol_type = other DNA
caggtgcagttgcaggagtcgggcccaggactggtaaagccttcggagaccctgtccctcacttgctctgtctctggtggctctattacttctaactactggagttggatccgacagcccccaggaaagggtctggagtgggttgggtacatctatgacactgggagcaccaagtacaacccctccctcaagggtcgagtcaccatatcatcagacatgtccaagaaccagttctccctcaaactgacctctctgaccgctgcggacacggccatctattactgtgcgagaaggacatatgctgttaacggtgattactactttgactcctggggccagggaaccctggtcaatgtctcctcag

SEQ ID NO: 3196 - DNA, 382 bp, synthetic construct
  misc_feature 1..382: note = Synthetic construct
  source 1..382: mol_type = other DNA
caggtgcaactgcaacagtggggcgcaggagtgttgaagccttcggagaccctgtccctcacctgcgctgtcgatggtgggtccttcagtggttacttctggagttggatccgccagcccccaggaagggggctggagtggattggggaaatcactcatcgcggagacatcagatacaacccgtccctcaagagtcgggtcaccatatccgttgacacgtccaagaaccacttctccctgaacctgacctctgtgaccgccgcagacacggctgtatattattgtgcgcgaggccttttttattttgggtcggggacttatgcacgagatccacggagttgggggtactggggccagggagccccggtcaccgtctcctcag

SEQ ID NO: 3197 - DNA, 378 bp, synthetic construct
  misc_feature 1..378: note = Synthetic construct
  source 1..378: mol_type = other DNA
caggtgcaaatacaacagtggggcgcaggactgttgaagccttcggagaccctgtccctcacctgcgctgtctatggtgggtccttcagttcttactcctggagttggatccgccagcccccagggaagggactggagtggattggagaaatcagtcatagtggaaccacaaactacaacccgtccctcacgagtcgactcaccatatcaattgacacgtccgagaatgaatcttccttgaggctgagctctgtgaccgccgcggacacgggtgtatatttctgtgcgagaggggaggcgatagtattgtttggggagctgttaaaacgcccttatatggatgtctggggcaaagggaccacagtcaccgtctcctca

SEQ ID NO: 3198 - DNA, 367 bp, synthetic construct
  misc_feature 1..367: note = Synthetic construct
  source 1..367: mol_type = other DNA
caggtgcagctacagcagtggggcgcaggactgttgaagccttcggagaccctgtccctcacctgcggtgtctatggtgagtccttcattgggtactactggagttggatccgccagcccccagggaaggggctggagtggattggggaagtcaatcatagtggaagcaccaactacaacccgtccctcaagagtcgagtcagtatatcagtagacacgtccaagaaccagttttccctgaagttgaactctgtgaccgccgcggacacggctgtgtatttctgtgcgagaggctcagcacgtctagcagcaggaagaagtgcttttgatttctggggccaagggacaatggtcaccgtctcttcag

SEQ ID NO: 3199 - DNA, 370 bp, synthetic construct
  misc_feature 1..370: note = Synthetic construct
  source 1..370: mol_type = other DNA
caggtgcagctacagcagtggggcgcaggactgttgaagtcttcggagaccctgtccctcacctgcgctgtttatggtgggtccttcagtggttactactggagttggatccgccagcccccagggaaggggctggagtggattggggaaattaatcatagtggaagcactaattacaacccgtccctcaaaagtcgagtcaccatatcaggagacacgtccaagaaccaattctccctgaagatgaactctgtgaccgccgcggacacggctgtgtattattgtgcgaggacccccccatatagtggctacgattacgaaggctactttgactactggggccagggaaccctggtcaccgtctcctcag

SEQ ID NO: 3200 - DNA, 364 bp, synthetic construct
  misc_feature 1..364: note = Synthetic construct
  source 1..364: mol_type = other DNA
caggtgcaattacagcagtggggcggaggactgttgaagccttcggagaccccgtccctcacctgcggtgtctctggtgggtccttcagtgattactactggagttggatccgccagtccccagggaaggggctggagtggattggggaaatcaatcatagtggaaccaccaactacaacccgtccctcaagagtcgagtcaccatatcagtagacacgtccaagaaccagttctccctgaacctgacctccgtgaccgccgcggacacggctgtttattattgtgcgagaggggactggtttcagggtagtggccttccttttgactcctggggccagggaagcctggtcaccatctcctccg

SEQ ID NO: 3201 - DNA, 361 bp, synthetic construct
  misc_feature 1..361: note = Synthetic construct
  source 1..361: mol_type = other DNA
caggtgcagctgcaggagtcgggcccaggactggtgaagccttcgcagaccgtgtccctcacctgtgctgtctctggtgactccatcagtggtaatacttattcctggagttggatccggcagccaccaggggggagactggaatggattgggaatatcttctatacggggagcaccgactccaacccgtccctccagagtcgagtttccatttcagttgacacgtccaagaatcaattctccctcactctcacctctctaaccgccgcggacacggccgtgtatttttgtgccagggctgggaggggcccaagtgtctttgactactggggccagggactcctggtcaccgtctccccag

SEQ ID NO: 3202 - DNA, 364 bp, synthetic construct
  misc_feature 1..364: note = Synthetic construct
  source 1..364: mol_type = other DNA
caggtgcacctgcaggagtcgggcccaggactggtgaagccttcggcgaccctgtccctcacctgcaatgtctctggtggctccatcagtaatcactactggagttggatccggcaggccccagggaagggactggagtggattggatatttctataacagcgggagcgccaattacaacccctccctcaagggtcgagccaccatatcagtagactcgtccaagaaccagttgtccctgaagctgaggtctgtgaccgccgcagacacggccacatatcactgtgcgacgtatgattcggggagttattaccaatctcccttagacttctggggccagggaacccgggtcaccgtctcctcag

SEQ ID NO: 3203 - DNA, 361 bp, synthetic construct
  misc_feature 1..361: note = Synthetic construct
  source 1..361: mol_type = other DNA
caggtgcaaatacaagagtcgggcccaggactggtgaggccttcggagaccctgtcgctcacctgcagtgtctctaatggctccgtcagcagtaacttctggagttggattcggcagcccccagggaagggactggagtggattggatatgtggatcacagtgggagttccagctaccacccctccctcaagagtcgaatcaccatgtccgtagacacgtccaagaaccaggtctccctgaagctgaggtctgttaccgccgctgacacggccgtctattactgtgcgagacattcagattggatacagttgtggttctttgacttctggggccagggaaccctggtgaccgtctccgcag

SEQ ID NO: 3204 - DNA, 402 bp, synthetic construct
  misc_feature 1..402: note = Synthetic construct
  source 1..402: mol_type = other DNA
caggtgcagctgcagcagtggggcgcagggctgttgaagccttcggagaccctgtccctcacctgcgctgtgtatggtggtgccttcagtgactactactggagttgggtccgccagttcccagggaaggggctggagtggattggcgaaatcaatcataatggagccaccagtgacaacccgtccctccagagtcgagtcgccatttccgtggacccgtacaagcagcagttctccctgagactgacgtctctgtccgccgcggacacggctgtctactactgtgcgcgagtggcagcgtatcacaatgcttcggggagtttccgtcctagtgggcgctcctactccttcttctactacatggacgtctggggcaaggggaccgcggtcaccgtctcctca

SEQ ID NO: 3205 - DNA, 361 bp, synthetic construct
  misc_feature 1..361: note = Synthetic construct
  source 1..361: mol_type = other DNA
catcttctactacaggagtcgggcccaggactagtaaagccttgggagaccctgtccctcagttgcactgtctctggtggctccatcagtgggtacttctggagttgggtccggcagcccccaggaaagggactgcaatggatcggaactatctacttcggcgggagaaccacctccaatccctccctcaggagtcgagtcaccatttcgattgacacctctaagaatcaattcttcttgaacatggactctctgagtgctgcagacacggccgtctattactgtgcgagaatgggggcatatggcagtggcttttatgggggatactggggccagggaaccctggtcaccgtctcctcct

SEQ ID NO: 3206 - DNA, 343 bp, synthetic construct
  misc_feature 1..343: note = Synthetic construct
  source 1..343: mol_type = other DNA
caggtgcagctgcaggagtcgggcccaggactggtgaagccttcacagaccctgtccctcacttgcactgtctcgggtgcctccgtcaacactggtaatttctattggagttgggtccggcggcccgccggacagggactagagtggattgggcgtatctatactactggaatcgccaactacatcccctccctcgaaagccgactctccatatcaatggacacgtcgaagaaccagttttccctgaatctgacctctgtgaccgcggcagactcggccgtatacttttgtacgagaagtgatagacactggggccagggaaccctagtcaccgtctcctcag

SEQ ID NO: 3207 - DNA, 370 bp, synthetic construct
  misc_feature 1..370: note = Synthetic construct
  source 1..370: mol_type = other DNA
caggtgcacctgcaggagtcgggcccaggactggtgaagacttcggaaaccctgtccctcacctgcgttgtttctggtccctccatcaacagttcttactcctgggcctggatccgccagccccctgggaaggggctggagtggattgggactgtctatcataatgggaacacctactacaatccgtccctcaagagtcgtatctcattatttgttgacacgtccaagaggcagatctccctgaaggtcaactctgtgaccgccgcagacacggccgtctattactgtgcaaatttattttgtgggggtggtaggtgctattccctgtttgactactggggacagggaaccctggtcgccgtctcctcag

SEQ ID NO: 3208 - DNA, 379 bp, synthetic construct
  misc_feature 1..379: note = Synthetic construct
  source 1..379: mol_type = other DNA
cagctgcaacttcaggagtcgggcccaagactcttgaggccttcggagaccctgtccctcacctgcgctgtctctggtggctccatcagggttgacacattctactgggcctggctccgccagtccccgggcaagggactggagtggattgggagtatccattatactgggcccgccctatacaacccgtccctcgagagccgagccaccttgtccgtcgacacgtcccagaatcaggtctccctacaattgacttctatgaccgccgcagacgccgctgtctattactgtgcgagacacggaggaagtacaccccactatattcgagtgaactggttcggcccctggggccggggatcccaggtcattgtctcctcag

SEQ ID NO: 3209 - DNA, 367 bp, synthetic construct
  misc_feature 1..367: note = Synthetic construct
  source 1..367: mol_type = other DNA
caactgcagctgcaggagtcgggcccagggctggtgaagccctcggagaccctgtccctcacctgcactgtctctggtggctccatcagcagtagtagttactactgggcttggatccggcaggccccagggaagggactggaatggcttgggagtatgtatgagagtggaaacacactcatcaaaccgtccctcaagagtcgactttccatgtccaaagacacgtccaatatccaattctccctgagtctgggctctgtgaccgccacagacacggctttttattattgtgcgagacaaacttcgcttgggggagttatcgcttttgacatctggggccacgggacaagggtcaccgtctcttcag

SEQ ID NO: 3210 - DNA, 393 bp, synthetic construct
  misc_feature 1..393: note = Synthetic construct
  source 1..393: mol_type = other DNA
cagctgcagctgcaggagtcgggcccaggactggtgaagccctcggagaccctgtccctcacctgcactgtctctggtggctccatcagcagtagtaattactattggggctggatccgccagcccccagggaagagtctggagtggattgggagtatccattatagtgggaacacctactacaacccgtccctcgagagtcgggtcaccatatccgtagacacgtccaacaaccagttctccttgaggctgatctctgtgaccgccgcagacacggctgaatattactgtgcgacccatcctcgtgggacatttgagggagcccatgactattactactactactactacatggacgtctggggcgaagggaccacggtcaccgtctcctca

SEQ ID NO: 3211 - DNA, 364 bp, synthetic construct
  misc_feature 1..364: note = Synthetic construct
  source 1..364: mol_type = other DNA
cacctgcagctgcaggggtcggacccaggactggtgaagccttcggagaccctgtccctcacctgcactgtctctggtggctccatcagcggtactagtgactactggggctggatccgccagcccccagggaagggactggagtggattgggagtatctattatagtgggagcacctacttcaacccgtccctcaagaggcgagtcaccatatccgtcgacacgtccaagaaccagttctccctgaagctgagctctgtgaccgccacagacacggctgtgtattactgtgcgagacacccctacggtggtaactccgggcaggactactggggccagggaaccctggtcaccgtctcctcag

SEQ ID NO: 3212 - DNA, 379 bp, synthetic construct
  misc_feature 1..379: note = Synthetic construct
  source 1..379: mol_type = other DNA
cagctgcagctgcaggagtcgggcccaggactggtgaagccttcggagaccctgtccctcacctgcactgtctctggtggctccatcagcagtaatagttactactggggctggatccgccagcccccagggaaggggctggagtggattgcaagtatctattatagtgggagcacctacttcaacccgtccctcaagagtcgagtcgccatatccgtggacacttccaggaaccagttctccctgaagctgacctctgtgaccgccgcagacacggctgtgtattactgtgcgagatcaattcctttggaatatagtagtcaaacggggggtttgttcgacccctggggccagggaaccctggtcaccgtctcctcag

SEQ ID NO: 3213 - DNA, 388 bp, synthetic construct
  misc_feature 1..388: note = Synthetic construct
  source 1..388: mol_type = other DNA
cagctgcagctgcaggagtcgggcccaggactggtgaagccttcggagaccctgtccctcacctgcactgtctcaggtggctccatcagtagtagtacttactactggggctggatccgccagcccccagggaaggggctggagtggattgggagtatctattatagtgggatcacctactacaacccgtccctcaagagtcgagtcaccatatccgtagacacgtccaagaaccagttctccctgaaactgagctctgtgaccgccgcagacacggctgtgtattactgtgcgagacggccgcccggcgattgtactaatggtgtatgctccacgcaaaggtggttcgacccctggggccagggaaccctggtcaccgtctcctcag

SEQ ID NO: 3214 - DNA, 372 bp, synthetic construct
  misc_feature 1..372: note = Synthetic construct
  source 1..372: mol_type = other DNA
cagctgcagctgcaggagtcgggcccaggactggtgaagccttcggagaccctgtccctcacctgcactgtctctggtggctccatcagcagtagtagttactactggggctggatccgccagcccccagggaaggggctggagtggattgggagtatctattatagtgggagcacctactacaacccgtccctcaagagtcgagtcaccatatccgtagacacgtccaagaaccagttctccctgaagctgagctctgtgaccgccgcagacacggctgtgtattactgtgcgagagctagcagctcgtccaaatactactactactacatggacgtctggggcaaagggaccacggtcaccgtctcctca

SEQ ID NO: 3215 - DNA, 367 bp, synthetic construct
  misc_feature 1..367: note = Synthetic construct
  source 1..367: mol_type = other DNA
cagctgcagctgcaggagtcgggcccaggactggtgaagccttcggagaccctgttcctcacctgctctgtctctggtggctccatcagcagtagtacttactactggggctggatccgccagcccccagggaaggggctggagtggattgggagtatctattatagtgggagcagctactacaacccgtccctcaagagtcgagtcaccatatccgtagacacgtccaagaatcagttctccctgaagctgagctctgtgaccgccgcagacacggctgtgtattactgtgcgagacggggagtgggagctacgaggaaggcttttgatatctggggccaagggacaatggtcaccgtctcttcag

SEQ ID NO: 3216 - DNA, 375 bp, synthetic construct
  misc_feature 1..375: note = Synthetic construct
  source 1..375: mol_type = other DNA
cagctgcagctgcaggagtcgggcccaggactggtgaggccttcggagaccctgtccctcacctgctctgtctctggtggctccatcagcagtagtagttactactggggctggatccgccagcccccagggaaggggctggagtggattgggagtatctattatagtgggagctcctacttcaatccgtccctccagagtcgagccaccttatccgtagacacgtcccagaaccagttctccctgaggctgagctctgtgaccgccgcagacacggctgtgtattactgtgtgagacacgactacagtagcttttactactactactacttcatggacgtctggggcacagggaccacggtcatcgtctcctca

SEQ ID NO: 3217 - DNA, 355 bp, synthetic construct
  misc_feature 1..355: note = Synthetic construct
  source 1..355: mol_type = other DNA
cagctgcagctgcaggagtcgggcccaggactggtgaagccttcggagaccctgtccctcacctgcactgtctctggtggctccatcagcagtagtagttactactggggctggatccgccagccccccgggaaggggctggagtggattgccagtatctattatagtgggagcacctactacaacccgtccctcaagagtcgagtcaccatatccgtagacacgtccaagaaccagttctccctgaaactgagttctgtgaccgccgcagacacggctgtgtattactgtgcgagcgcattagcagctggtaaatactactggggccagggaaccctggtcaccgtctcctcag

SEQ ID NO: 3218 - DNA, 358 bp, synthetic construct
  misc_feature 1..358: note = Synthetic construct
  source 1..358: mol_type = other DNA
caggtgcagctgcaggagtcgggcccaggactggtgaggccttcggagaccctgtccctcacctgcactgtctctggtggctccatcactagttactactggggctggatccggcagcccccaggaaagggactggagtggattgggtatgtctattacagtgggagcaccaactacaacccctccctccagagtcgaatcaccatatcagtagacacgtccaacaaccagttctccctgaagttgagctctgtgaccgctgcggacacggccgtgtatttctgtgcgagactcttaagcctgaggaatgcggcttttgatatctggggccaagggacaatggtcaccgtctctccag

SEQ ID NO: 3219 - DNA, 370 bp, synthetic construct
  misc_feature 1..370: note = Synthetic construct
  source 1..370: mol_type = other DNA
caggtgcagctgcaggagtcgggcccaggaccggtgaagccttcggagaccctgtccctcacctgcacagtctctggtttctccatcagaaatggttatttctggggctggatccggcagcccccagggaagggactggagtggattggaagtattcaccacagtgggagcacgtcctacaacccgtccctcaagagtcgagtgaccatctccttagacatgtcgaagaaccagttctccctgaagctgacctctgtgaccgccgcagacacggccgtgtattattgtgcgagagattatattgatgtaacccacggctacagttgtttcgacccctggggccagggaaccctggtcaccgtctcctcac

SEQ ID NO: 3220 - DNA, 379 bp, synthetic construct
  misc_feature 1..379: note = Synthetic construct
  source 1..379: mol_type = other DNA
caggtgcagctgcaggagtcgggccccggcctggtgaagccttcggagaccctgtccctcacctgcgctgtctctggttactccatcagtagtggttactactggggctggatccggcagcccccagggaagggactggagtggattgggagtgtatttcatagtgggaaaaccgactacaggtcgtccctcgagagtcgactcaccatatcattagacacgtccaacaaccgcttctccctgagactgaggtctgtgaccgccgcagacacggccatttattactgtgcgagagactttgatcaaggatattattcttcggggagttattcctggttcgacgcctggggccagggaaccctggtcaccgtctcctcag

SEQ ID NO: 3221 - DNA, 367 bp, synthetic construct
  misc_feature 1..367: note = Synthetic construct
  source 1..367: mol_type = other DNA
caggtgcagctgcaggagtcggggccaggactggtgaagccttcggagaccctgtccctcacctgcgctgtctctggttatttcatcagtagtggtcattattggggctggatccggcagcccccagggaagggactggagtggattgggagtatgtatcatagtggcagtccctactacagtccgtccctcaagagtcgagtcaccatatccgtagacacgtccaagaacgaggtctccctgaagctgagctctgtgaccgccgcagacacggccgtatattattgtgtgagagggggccgggcaactttgaccaacgcggactttgactactggggccagggaatcctggtcatcgtctcctcag

SEQ ID NO: 3222 - DNA, 367 bp, synthetic construct
  misc_feature 1..367: note = Synthetic construct
  source 1..367: mol_type = other DNA
caggtgcagttgcaggagtcgggcccaggactggtgaagccttcggagaccctgtccctcacctgcgctgtctctggttactccatgagcagaggttactactggggctggatccggcagcccccagggaaggggctggaatggattgggagtatctatcatagtgggagcacctactacaacccgtccctcaagagtcgagtcaccatatcagtagacatgaccaagaaccagttctccctgaagctgagctctgtgaccgccgcagacacggccgtgtattactgtgcgagaacatatagtagtggttattatagtgatgcttttgatatctggggccaagggacaatggtcaccgtctcttcag

SEQ ID NO: 3223 - DNA, 367 bp, synthetic construct
  misc_feature 1..367: note = Synthetic construct
  source 1..367: mol_type = other DNA
cacgtgcagctgcaagagtggggcccaggactggtgaagccttcggagaccctgtccctaacctgcgttgtctctaattactccattagcagtggctcttactggggctggatccggcagcccccagggaaggggctggagtggattggaaacatctaccatagtgggaaaacctactacaattcgtccctcaagagtcgagtcgccatatcggtggacttgtccaagaaccaactctccctgaacctgcgctctgtgacggccgcagacacggccgtgtattattgtgtgagaaccccagcgttaggggagttagttggatacttccagccctggggccagggcaccctggtcatcgtctcctcag

SEQ ID NO: 3224 - DNA, 379 bp, synthetic construct
  misc_feature 1..379: note = Synthetic construct
  source 1..379: mol_type = other DNA
caggtgcagctgcaggagtcgggcccacgactggtgaagtcttcggagaccctgtccctcacctgcgctgtctctggttactccatcagcagtggttactactggggctggatccggcagcccccagggaaggggctggagtggattggatttatctatcatagtgggaacaccgactacaacccgtccctcaagagtcgagtctccatatcagtagacacgtccaagaaccagttctccctgaagctgacctctgtgaccgccgcagacacggccgtatatttctgtgcgagagacgcatataattactatgcttcgaggagccgatacggttactttgactactggggccagggaaccctggtcactgtctcctcgg

SEQ ID NO: 3225 - DNA, 378 bp, synthetic construct
  misc_feature 1..378: note = Synthetic construct
  source 1..378: mol_type = other DNA
caggtgcagctgcaggagtcgggcccaggactggtgaagccttcggagaccctgtccctcagttgtgttgtctctggttattccatcagtactggttactactggggctggatccggcagcccccagggaaggggctggagtggattgggactatctatcacagagggaacacctactacaacccgtccctcaagagtcgagtcaccatatccgtagacacgtccaagaaccagttgtccctgaacctgaagtctgtgaccgccgcagacacggccgtgtattactgtgcgcgagacgggacgccggctgagcgacggtcctactcctactcctacatggacgtctggggcagagggaccacggtcaccgtctcctca

SEQ ID NO: 3226 - DNA, 357 bp, synthetic construct
  misc_feature 1..357: note = Synthetic construct
  source 1..357: mol_type = other DNA
caggtgcagcttcaggagtcgggcccaggactggtgaagccttcggagaccctgtccctcacctgcgctgtctctggttactccatcagcagtggttactactggggctggatccggcagcccccagggaaggggctggagtggattgggactatgtttcatagtgggaacacctactacagcccgtccctcaagagtcgagtcaccatatcagtagacacgtccaagaaccagttctccctgaagctgaggtctatgaccgccgcagacacggccgtgtattactgtgcgagaggggagtatctcggctactacatggacgtctggggcaaagggaccacggtcaccgtctcctca

SEQ ID NO: 3227 - DNA, 384 bp, synthetic construct
  misc_feature 1..384: note = Synthetic construct
  source 1..384: mol_type = other DNA
caggtgcagctgcaggagtcgggcccaggactggtgaagccttcggagaccctgtccctcacctgcgctgtctctggttactccatcagcagtggttactactggggctggatccggcagcccccagggaaggggctggagtggattgggagtatctatcatagtgggagcacctactacaacccgtccctcaagagtcgagtcaccatatcagtagacacgtccaagaaccagttctccctgaagctgagctctgtgaccgccgcagacacggccgtgtattactgtgcgagaatgccgaatcttatggatacagctatggtttcctactactactactacatggacgtctggggcaaagggaccacggtcaccgtctcctca

SEQ ID NO: 3228 - DNA, 364 bp, synthetic construct
  misc_feature 1..364: note = Synthetic construct
  source 1..364: mol_type = other DNA
caggtgcagctgcaggagtcgggcccaggactggtgaagccttcggagaccctgtccctcacctgcgctgtctctggttactccatcagcagtggttactactggggctggatccggcagcccccagggaaggggctggagtggattgggagtatctatcatagtgggagcacctactacaacccgtccctcaagagtcgagtcaccatatcagtagacacgtccaagaaccagttctccctgaagctgagctctgtgaccgccgcagacacggccgtgtattactgtgcgagaggggatgatagtagtggttatgccccctttgactactggggccagggaaccctggtcaccgtctcctcag

SEQ ID NO: 3229 - DNA, 361 bp, synthetic construct
  misc_feature 1..361: note = Synthetic construct
  source 1..361: mol_type = other DNA
caggtgcagctgcaggagtcgggcccaggactggtgaagccttcggagaccctgtccctcacctgcgctgtctctggttactccatcagcagtggttactactggggctggatccggcagcccccagggaaggggctggagtggattgggagtatctatcatagtgggagcacctactacaacccgtccctcaagagtcgagtcaccatatcagtagacacgtccaagaaccagttctccctgaagctgagctctgtgaccgccgcagacacggccgtgtattactgtgcgagagtcaatactatggttcggggaacttttgactactggggccagggaaccctggtcaccgtctcctcag

SEQ ID NO: 3230 - DNA, 382 bp, synthetic construct
  misc_feature 1..382: note = Synthetic construct
  source 1..382: mol_type = other DNA
caggtgcagctgcaggagtcgggcccaggactggtgaagccttcggagaccctgtccctcacctgcgctgtctctggttactccatcagcactggttactactggggctggatccggcagcccccagggaaggggctggagtggattgggagtatctatcatagtgagagcacctactacaacccgtccctcaagagtcgagtcatcatatcagtagacacgtccaagaaccagttctccctgaggctgagctctgtgaccgccgcagactcggccgtgtattactgtgcgtcaacgtattactatgatagtagtgggggaagacgggttcctgttgcttttgaaatctggggccaagggacaatggtcaccgtctcttcag

SEQ ID NO: 3231 - DNA, 373 bp, synthetic construct
  misc_feature 1..373: note = Synthetic construct
  source 1..373: mol_type = other DNA
caggtgcagctgcaggagtcgggcccaggactggtgaagccttcggagaccctgtccctcacctgcgctgtctctggttactccatcagcagtggttactactggggctggatccggcagcccccagggaaggggctggagtggattgggagtatctatcatagtgggagcacctactacaacccgtccctcaagagtcgagtcaccatatcagtagacacgtccaagaaccagttctccctgaagctgagctctgtgaccgccgcagacacggccgtgtattactgtgcgtcgaggggttcggggagttattataaagggggttactactttgactactggggccagggaaccctggtcaccgtctcctcag

SEQ ID NO: 3232 - DNA, 379 bp, synthetic construct
  misc_feature 1..379: note = Synthetic construct
  source 1..379: mol_type = other DNA
caggtgcagcttcaggagtcgggcccaggactggtgaagccttcggagaccctgtccctcacctgcactgtctctgtttactccatccgtagtgcttactactggggctggatccggcagcccccagggaaggggctggagtggattgggagtatgtatcccagcgggaacacctactacaacccgtccctcaagagtcgagtcaccatatcagttgacacgtccaagaaccagttcttcctgaacctgacttctgcgaccgccgcagacacggccgtgtatttctgtgcgagagcgatggattactctgatagtagtggtgattattactattacttcgatctctggggccgtggcaccctggtcacggtctcctcag

SEQ ID NO: 3233 - DNA, 370 bp, synthetic construct
  misc_feature 1..370: note = Synthetic construct
  source 1..370: mol_type = other DNA
caggtgcagctgcaggagtcgggcccaggactggtgaagccttcggaaaccctgtccctcacctgcgctgtctctggttattccatcagcagtggttactactggggctggatccggcagcccccagggcaggggctggagtggattggcagtatctatcatagtgggagcacctactacaacccgtccctcaagagtcgagtcaccatatccgtagacacgtccaagaatcagttttccctgaaactgagctctgtgaccgccgcagacacggccgtgtattactgtgtgagagagagctcttatggttcggggactagcaaatacttcgacccctggggccagggaaccctggtcaccgtctcctcag

SEQ ID NO: 3234 - DNA, 361 bp, synthetic construct
  misc_feature 1..361: note = Synthetic construct
  source 1..361: mol_type = other DNA
cagatacaactacaagagtcgggcccaggactggtgaagccttcggagaccctgtccctcacctgcgctgtctctggttactccatcagcagtggttactactggggctggatccggcagccccccactcaggggctagattggattgcgactatctttcatagtggaaacacctactataacccgtccctcaagagtcgagtcaccttatcaatggacacctccaagaaccagttctctttgaggttgacctctgtgaccgccgcagacacggccatgtattattgtgtgagacgctggtacggtgactaccccgcctttgactactggggccagggaaccctggtcgccgtctcctcaa

SEQ ID NO: 3235 - DNA, 370 bp, synthetic construct
  misc_feature 1..370: note = Synthetic construct
  source 1..370: mol_type = other DNA
caggtgcaactgcaggagtcgggcccacgactggtgaagccttcggagaccctgtccctctcctgcactgtgtctggtttcttcatttccactggttaccactggggctggatccggcagtccccagggaaggggctggagtggattgggaatatcaatcatggtgggatcacccactttaacccgtccctccagagtcgagtgtccatgtcagtagacacgtccaagaacgaattctttctgaacctgaggtctgtcaccgccgccgacacggccgtttattattgtgcgagagtcttgtgtagtggtcgtaagtgccaaggggatttcgactactggggccagggaacccgggtcaacgtctcttcag

SEQ ID NO: 3236 - DNA, 375 bp, synthetic construct
  misc_feature 1..375: note = Synthetic construct
  source 1..375: mol_type = other DNA
caggtgcagctgcaggagtcgggcccaggactggtgaggccttcggagaccctgtccctcgcctgcgctgtgtctggattctccatcaacagtgctcacctctggggctggatccggcagtcccccgggaagggactggactggattgcaagtgtttatcatagtgggaccacctactacaacccgtccctgaagagtcgagtcaccatttccctggacacgtccaagaaccagatctccctgaacctgaggtctgtgaccgccgcagacacggccatttattactgtgcgagacttatggagtcttctgaccccgctaattacttctcctacatggacgtctggggcgaagggaccacggtcaccgtctcctca

SEQ ID NO: 3237 - DNA, 376 bp, synthetic construct
  misc_feature 1..376: note = Synthetic construct
  source 1..376: mol_type = other DNA
cagctgcagctgcaggagtcgggcccaggactggtgaagccctcggagaccctgtccctcacctgcactgtgactggtggctccatcagcagtaatagttactattggggctggatgcgccagcccccagggaaggggctggagtggattgggagtatctattatagtggggaaacttattacaacccgtccctcaagagtcgagtctccatatccgtagacacgtccacgaatcacttctccctgaagctgacctctgtgaccgccgcagacacggctgtgtatttctgtgcgaccctgagttcttattatgatattttgactggtttggcctcggacgtctggggcaaagggaccacggtcaccgtctcctcag

SEQ ID NO: 3238 - DNA, 364 bp, synthetic construct
  misc_feature 1..364: note = Synthetic construct
  source 1..364: mol_type = other DNA
caggtgcagctgcaggagtcgggcccaggactggtgaagccttcggagaccctgtccctcacctgcgttgtctctggtttctccatgagtgatagttactactggggctgggtccggcggcccccagggaaggggctggagtggattgggaatatctatcatagtgggaccttctaccagaacccgtccctcaagaggcgagtcaccatatccatggacacgtccagccaccaattctccctggacctgcgctctgtgaccgccgcagattcggccgtttattactgtgcggggagacgctcggggaggggtgattactactttgaattgtggggccagggaatcccggtcaccgtctcgtcag

SEQ ID NO: 3239 - DNA, 364 bp, synthetic construct
  misc_feature 1..364: note = Synthetic construct
  source 1..364: mol_type = other DNA
caggtgcagctgcaggagtcgggcccaggactggtgaagccttcggagaccctgtccctcacctgcgctgtctctggttactacatcaggactggttactactggggctggttccggcagtccccaggggggggtctggagtggattgggaacatctaccacagtgggggcacctactacaacccgtccctcaagagtcgagtcaccatttcagtggacacgtccaagaaccagttctccctgaagctgagctctgtgaccgccgcagacacggccgtttattattgtgcgagagaaggttactatgatggtagtggttattacactcactggggccagggaaccctggtcaccgtctcctcag

SEQ ID NO: 3240 - DNA, 355 bp, synthetic construct
  misc_feature 1..355: note = Synthetic construct
  source 1..355: mol_type = other DNA
caggtgcagctgcaggaatcggggccaggactggtgaagtcttcggagaccctgtccctcagctgtactgtctctggtttctctctcatcggtggttaccactggggttggatccggcagcccccagggaagggggtggagtggatagggagtgtctttcatactgggacgacctactacaatccggccttcaagagtcgcgcctccatatctgtggacacgtccaagaacctgttctccctgaatgtgaagtctgcgaccgccgcagacacggccgtgtactattgtgcgagagtgggcattgcagcaggtgtcgacgtctggggccagggagccctggtcaccgtctcctcag

SEQ ID NO: 3241 - DNA, 388 bp, synthetic construct
  misc_feature 1..388: note = Synthetic construct
  source 1..388: mol_type = other DNA
caggtccagctggtgcagtctggggctgaggtgaggaagcctgggtcctcggtgaaggtctcctgcaaggcttccggaggcaccttcagcaggtatgctttcaactgggtgcgacaggcccctggacaagggcttgagtgggtgggagggatcatcccgatccttggcacagcaaactacgcacagaagttccagggcagagtcacgattatcgcggacgtgtccacgagcacagcctacctggaactgagcagcctgagatctgaggacacggccgtttattactgcgcgagagagagggcggattacgatctttttactggttatccctcacgcccagatgcttttgaaatctggggccaagggacattggtcagcgtctcttcag

SEQ ID NO: 3242 - DNA, 375 bp, synthetic construct
  misc_feature 1..375: note = Synthetic construct
  source 1..375: mol_type = other DNA
caggtcccgctggtgcagtctggggccgaactgaagaagcctgggtcctcggtgacggtctcctgcgaggcttctggaggcactttcatcaacaatgttttcagctgggtgcgacaggcccctggacaaggccttgagtggataggagggatcatccctgtctttggtacaactaattacgcacagaaattcaagggcagagtcatcattaccgcggacgaatccacaaacacagcctacatggagctgaatagtctgacatcagatgacacggccgtctactactgtgcgagacgcctggggtgggaacagggcggccgtcactcctactacatggacgtctggggcaccgggacaacggtgaccgtctcctca

SEQ ID NO: 3243 - DNA, 369 bp, synthetic construct
  misc_feature 1..369: note = Synthetic construct
  source 1..369: mol_type = other DNA
caggtccaactggtgcagtctggggctgaggtgaagaggcctgggtcctcggtgaaggtctcctgcaagactcctgagggcaccctcaccaagtttgctttcagctgggtgcgacaggcccctggacaagggcttgagtggatgggaggcatcattcctctctttggaacaccaaactacgcacagaagttccagggcagagtcaccataagcgcggacgaacgcacgaatacaatctatatggaggtgagcagcctgacatctgaggacacggccgtctatttttgtgccagagatgggggctacgatgcagtcttattctactacctgggcgtctggggcggagggaccagtgtcaccgtctcctca

SEQ ID NO: 3244 - DNA, 358 bp, synthetic construct
  misc_feature 1..358: note = Synthetic construct
  source 1..358: mol_type = other DNA
caggtccagctggtgcagtctggggctgaggtgaagatgcctgggtcgtcggtgaaggtctcctgcagggcttctggagcctccttcagcaatcatgctttcagttgggtgcgacaggcccccggacaaggtcttgagtggatgggagggagcatccctgtccttggcacaacaaactacgcacagaaattccagggcagagtcacgatcaccagagacgattctaagaccacaatttatatggagttgagcagtctgagatctgaggacacggccgtctattactgtgggaggatccatgatagtggttggttcgttctttattggggccagggaacccaggtcaccgtctcctcag

SEQ ID NO: 3245 - DNA, 367 bp, synthetic construct
  misc_feature 1..367: note = Synthetic construct
  source 1..367: mol_type = other DNA
cgggttctgctggtgcagtctggatctgagctgaagaagcctggggcctcagtgaaggtctcctgcaagacctctgatggcgcctttagcacccatgctttcagttgggtgcgccaggcccctggacaagggcttgagtgggtgggatggatcagtgcttccaacggtcacacaaactacgcacagggactcgaggacagagtcaccatgaccacagacacaaccacaaagacagcctatctggagttgaggagcctgaaatctgacgacacggccgtctatttctgtgcgaggcacccgcggaagttcggggagttattgggatttgactcctggggccagggaaccctggtcgccgtctcctcag

SEQ ID NO: 3246 - DNA, 296 bp, synthetic construct
  misc_feature 1..296: note = Synthetic construct
  source 1..296: mol_type = other DNA
gggactcatcttcagtgccgttggcttccactgggtccgccaggctccaggcaaggggctggagtgggtggcagttattagatacgatggggggaagcagtactacgcagactccgtgaagggccgattcaccatctccagagacgattccaagaacacgctgtatctgcaattgaccagcctgagacctgaagacacggctgtatattactgtgcggcggagggaggtgattgtcttaatggtgtgtgctataaagtctcctggggcccgggaaccctggtcaccgtctcctcag

SEQ ID NO: 3247 - DNA, 355 bp, synthetic construct
  misc_feature 1..355: note = Synthetic construct
  source 1..355: mol_type = other DNA
gaggtgcagctggtggagtctgggggaggcctggtcgagcctggggggtccctgagactctcttgtataacctcaggattcaccttcagtgactacaccttccactgggtccgccaggctccagggaaggggctggagtgggtctcatccattagtagtggtcgtgttttcattcattacgcagactcagtgaggggccgattctccgtctccagagacaacgccaagaattcagtgtttctgcaaatggacagcctgagagtcgaggacacggctgtttattattgtgcgagaggtctgtcctcagtggctggcacggggtggggccagggaaccctggtcaccgtctcctcag

SEQ ID NO: 3248 - DNA, 367 bp, synthetic construct
  misc_feature 1..367: note = Synthetic construct
  source 1..367: mol_type = other DNA
gaggtccagttggtacagtccggggctgaggtgaagaggcctggggccaccgtgaaaatctcctgcaaggcttctggatacaccttcagcgacttctacttccactgggtgcaacaggccccggaaaaagggcttgagtggatgggacgtattgatcctgacgatggtgaagttctatatgcagagaagttccagggcagagtcaccatcaccgcagacacgtctacagacacactcttcatggaactgagcaatttgaaatctgacgacacggccgtgtattactgtgcatcagcagagcagtggcccacggagcacgacgcttttgatatctggggccaagggacaatggtcaccgtctcttcag

SEQ ID NO: 3249 - DNA, 379 bp, synthetic construct; identical to SEQ ID NO: 1768
  misc_feature 1..379: note = Synthetic construct
  source 1..379: mol_type = other DNA

SEQ ID NO: 3250 - DNA, 373 bp, synthetic construct
  misc_feature 1..373: note = Synthetic construct
  source 1..373: mol_type = other DNA
caggcgcagctggtggagtcggggggaggcttggtcaagcctggagggtctctgagactctcgtgtatagcctctggattcacgttcggcgaccactacttgacctggatacgcctgattcaagggaggggcctggagtgggtgtcatatatcagtgggggtggcagaaatacagactatatagactctgtgaagggccgattcaccatttccagggacaaatccaggaactcgctctatctgcaaatggacagcctcaaagtcgaagactcgggtgtctattattgtgcgagaggaggcggtgggttcagtcatggccgcctcaaggctcttgatgtctggggtctggggacaaaggtcaccgtcgcttcag

SEQ ID NO: 3251 - DNA, 370 bp, synthetic construct
  misc_feature 1..370: note = Synthetic construct
  source 1..370: mol_type = other DNA
gacgtgcagctggtggagtctgggggaggcgtggcacggcctggggggtccctgagactctcctgtgaagcttctggattcatctttgatgattttggcttgacctgggtccgccaagctccagggaaggggctggaatgggtcgctggtcttaattggaagggtggtaacatacattatgcagactctgtgaagggccgattcaccatctccagagacaacgccaagaactccctctatctggagatgaacagtctgagagtcgaagacacggccttgtattactgcgcgagagtcggcctgttgcagcaggtggcccatgatgctttggatatctggggccaagggacactggtcaccgtctcttcag

SEQ ID NO: 3252 - DNA, 367 bp, synthetic construct
  misc_feature 1..367: note = Synthetic construct
  source 1..367: mol_type = other DNA
caggtgcagctggtggaatctgggggaggcttggtcaagcctggagggtccctcagactctcctgtgcggcctccggattcagcatcagtgactactcgttgagctggatccgccaggctccagggagggggctggagtgggtttcatacattactagtggtggtcgtaacatacaatacgcagacgctgtgaggggtcggttcaccatctccagggacaacgccgagaactcactgtatctacaaatgaacagcctgagagccgacgacacggctgtttattattgtgcgagaccttgtagtggtgctaactgcttcaacacggcgggtctctggggccagggaaccctggtcaccgtctcctcag

SEQ ID NO: 3253 - DNA, 373 bp, synthetic construct
  misc_feature 1..373: note = Synthetic construct
  source 1..373: mol_type = other DNA
caggtgcagctggtggagtctgggggaggcgtggtccagcctgggaggtccctgaggctctcctgtgcagcctctggattcacgttaaatacctatggcttgcactgggtccgccaggctccaggcaaggggctggagtgggtggctgttagtccatatgatggaagcagtcaattctacgcagactccgtgaagggccgattcaccatctccagagacaattccaagaacacactatctctgcaaatggacagcctgagagctgacgacacggccacttatttctgtacgagaggccggctgattttcagcagcagccggtacgatgcttttgatatctggggccaagggacactggtcatcgtctcttcag

SEQ ID NO: 3254 - DNA, 367 bp, synthetic construct
  misc_feature 1..367: note = Synthetic construct
  source 1..367: mol_type = other DNA
caggtgcaactggtgcagtctggggctgaggtgaagaagcctggggcctcagtggaggtctcctgcaaggcttctggatacaacttcctcggccactatttgcactgggtgcgacaggcccctggacaaggccttgagtggatgggatggatcaaccctgtcagtggtgacgcatactatgcacagaaatttcagggcagggtcaccatgaccagggacacgtccatcagtgctgcctacatggagttgagcaggctgaaatatgacgacgcggccatttatttctgtgcgagagatatggggcgtattggaagtagcaccgaatttgactgctggggccagggaaccctggtcaccgtctcctcag

SEQ ID NO: 3255 - DNA, 361 bp, synthetic construct
  misc_feature 1..361: note = Synthetic construct
  source 1..361: mol_type = other DNA
caggtccagttggtacagtctggggctgaggtgaagaggcctggggcctcagtgaaggtctcctgcaaactttccggatacaccctcaccggaatatccttgcactgggtgcgacaggctcctggagaaggacttgagtggatgggaggtcctgaccctgaagatggcgcaacaatctacgcacagaagttcctgggcagagtcaccatgaccgaggacacaactgcagacacagcctacatggagctgaccagcctgacatttgcggacacggccgtgtattactgtgcaacagatcggcgagtggaaactctctactttcacttctggggccagggaaccctggtcaccgtctcctcag

SEQ ID NO: 3256 - DNA, 370 bp, synthetic construct
  misc_feature 1..370: note = Synthetic construct
  source 1..370: mol_type = other DNA
cagatcaccttgaaggagtctggtccaacgcttgtagaggccacacagaccctcacgctgacctgcaccttctctgggttcccactgaccaccgaaaaagtgggtttggcctggatccgtcagccccccggaaaggccctagagtggcttgcattaatctacgggaatgatgataagttctacagcccgtctctaaaggacagactctccatctccaaggatactttcattaaccaggtggtccttacaatgaccaatgtggaccctctggacacagccacatattactgtgtacgcgactatgattacgttgggggcagttatcgtcttgaccggtggggccagggaaccctggtcaccgtcacctcaa

SEQ ID NO: 3257 - DNA, 367 bp, synthetic construct
  misc_feature 1..367: note = Synthetic construct
  source 1..367: mol_type = other DNA
caggtccaattgctgcagtctggggctgaggtgaagacgcctgggtcctcagtgaaaatctcctgcacggcttctggaggcaccttcagcggctatggctttagttgggttcgacaggcccctggacaagggcttgagtggatgggtggcttcttccctctccttggaacaccaacctacgcacagaagttcggggggagagtcaccattgacgcggacgaattcacgagcacagccttcatggaactgagcgacctgcgatctgaagacactgccctgtactcctgtgcgagacttctcaaggggtccagttggtacaatggtcttgacatctggggccacgggacaatggtcatcgtctcttcag

SEQ ID NO: 3258 - DNA, 364 bp, synthetic construct
  misc_feature 1..364: note = Synthetic construct
  source 1..364: mol_type = other DNA
caggtgcagctggtggagtctgggggaggcgtggtccagcctgggaggtccctgagactctcctgtgcagcctctggattcaccttcaggagctatggctttcactgggtccgccaggctccaggcaaggggctggagtgggtggcagttatttcatatgatggaggtcttaaatactatgcagactccgtgaagggccgattcaccatctccagagacaattccaagaacacggtgtatttgcaaatgaacagcctgggagctgacgacacggctgtatatttctgtgcgaaacggtataatactacccacctttggtactttgactcctggggccagggaaccctggtcaccgtctcctcag

SEQ ID NO: 3259 - DNA, 66 bp, synthetic construct
  misc_feature 1..66: note = Synthetic construct
  source 1..66: mol_type = other DNA
tgtgcgagacatcgggattacgacattttgactggttattatatgggggactactttgactactgg

SEQ ID NO: 3260 - DNA, 54 bp, synthetic construct
  misc_feature 1..54: note = Synthetic construct
  source 1..54: mol_type = other DNA
tgtgcgagacttaacttggggttcctacagattgggggttcccttgatatctgg

SEQ ID NO: 3261 - DNA, 57 bp, synthetic construct
  misc_feature 1..57: note = Synthetic construct
  source 1..57: mol_type = other DNA
tgtgcgagagctcggggttattattatgatagtagtggttatcaaattgactactgg

SEQ ID NO: 3262 - DNA, 63 bp, synthetic construct
  misc_feature 1..63: note = Synthetic construct
  source 1..63: mol_type = other DNA
tgtgcgagagttattactagggcgagtcctggcacagacgggaggtacggtatggacgtctgg

SEQ ID NO: 3263 - DNA, 87 bp, synthetic construct
  misc_feature 1..87: note = Synthetic construct
  source 1..87: mol_type = other DNA
tgcgcgcggggccacagtagctcgtctcaacggtctagcttcgacggtaactttttatactactactatcaccaaatggacgtctgg

SEQ ID NO: 3264 - DNA, 69 bp, synthetic construct
  misc_feature 1..69: note = Synthetic construct
  source 1..69: mol_type = other DNA
tgtgtgacttctttaattcggccatattgtagtggcggtgtctgctattcgaactggttcgacccctgg

SEQ ID NO: 3265 - DNA, 54 bp, synthetic construct
  misc_feature 1..54: note = Synthetic construct
  source 1..54: mol_type = other DNA
tgtgcgagaggtcggggattgcagcaccagctgacagactggttcgacccctgg

SEQ ID NO: 3266 - DNA, 54 bp, synthetic construct
  misc_feature 1..54: note = Synthetic construct
  source 1..54: mol_type = other DNA
tgtgcgagagtcccccccccgggagtggctaataataagtggttcgacctctgg

SEQ ID NO: 3267 - DNA, 66 bp, synthetic construct
  misc_feature 1..66: note = Synthetic construct
  source 1..66: mol_type = other DNA
tgtgcgagaggggaaggtccggggacttatatagtctcggggcgatggggctactttgagttctgg

SEQ ID NO: 3268 - DNA, 39 bp, synthetic construct
  misc_feature 1..39: note = Synthetic construct
  source 1..39: mol_type = other DNA
tgtggtagaccaggaatggcagaagttggtacttattgg

SEQ ID NO: 3269 - DNA, 57 bp, synthetic construct
  misc_feature 1..57: note = Synthetic construct
  source 1..57: mol_type = other DNA
tgtgcgaaagatcgcagtagtggctggtaccggggttttggggggattgactactgg

SEQ ID NO: 3270 - DNA, 39 bp, synthetic construct
  misc_feature 1..39: note = Synthetic construct
  source 1..39: mol_type = other DNA
tgttcgagaaggagggctgggcccgattttgattactgg

SEQ ID NO: 3271 - DNA, 45 bp, synthetic construct
  misc_feature 1..45: note = Synthetic construct
  source 1..45: mol_type = other DNA
tgtactacccgacatcaatattgtactactaccaggtgcccctgg

SEQ ID NO: 3272 - DNA, 36 bp, synthetic construct
  misc_feature 1..36: note = Synthetic construct
  source 1..36: mol_type = other DNA
tgtacggccgcgcgagttgcctggttcgacccctgg

SEQ ID NO: 3273 - DNA, 45 bp, synthetic construct
  misc_feature 1..45: note = Synthetic construct
  source 1..45: mol_type = other DNA
tgcacgacaatattcggagaagtgttatatccttttgactcctgg

SEQ ID NO: 3274 - DNA, 54 bp, synthetic construct
  misc_feature 1..54: note = Synthetic construct
  source 1..54: mol_type = other DNA
tgtgcaacagtgtataccaatgcctggtacggaggcgcgggttttgactactgg

SEQ ID NO: 3275 - DNA, 69 bp, synthetic construct
  misc_feature 1..69: note = Synthetic construct
  source 1..69: mol_type = other DNA
tgtgcgagagcggcaattaaacgggatgggtatggttcggggagttatccagatgctttagacatctgg

SEQ ID NO: 3276 - DNA, 54 bp, synthetic construct
  misc_feature 1..54: note = Synthetic construct
  source 1..54: mol_type = other DNA
tgtgcgaaacctccgggtaagggagcagtggctggcacctactttgactactgg

SEQ ID NO: 3277 - DNA, 45 bp, synthetic construct
  misc_feature 1..45: note = Synthetic construct
  source 1..45: mol_type = other DNA
tgtgcgagagatagttgtagtggtggaagttgctatgactactgg

SEQ ID NO: 3278 - DNA, 45 bp, synthetic construct
  misc_feature 1..45: note = Synthetic construct
  source 1..45: mol_type = other DNA
tgcgcgagacagggtctcggtggtcgggcctcgggagactcctgg

SEQ ID NO: 3279 - DNA, 57 bp, synthetic construct
  misc_feature 1..57: note = Synthetic construct
  source 1..57: mol_type = other DNA
tgtgcgagatctccacctgcttatgccaactcaataaacaactggttcgacccctgg

SEQ ID NO: 3280 - DNA, 45 bp, synthetic construct
  misc_feature 1..45: note = Synthetic construct
  source 1..45: mol_type = other DNA
tgtgcgagagataatagtactgggtggtattggtttgatccctgg

SEQ ID NO: 3281 - DNA, 48 bp, synthetic construct
  misc_feature 1..48: note = Synthetic construct
  source 1..48: mol_type = other DNA
tgtgcgaggggggaccggagcgtttaccccaactggttcgacctctgg

SEQ ID NO: 3282 - DNA, 48 bp, synthetic construct
  misc_feature 1..48: note = Synthetic construct
  source 1..48: mol_type = other DNA
tgtgcgagagccctctacggtggtcggggacactggttcgacccctgg

SEQ ID NO: 3283 - DNA, 36 bp, synthetic construct
  misc_feature 1..36: note = Synthetic construct
  source 1..36: mol_type = other DNA
tgtgcgagactggactttcggggagtcctccgctgg

SEQ ID NO: 3284 - DNA, 60 bp, synthetic construct
  misc_feature 1..60: note = Synthetic construct
  source 1..60: mol_type = other DNA
tgtgcgagagacttaacggaagtggtgggagcttctgtttccgatgcttttgatatctgg

SEQ ID NO: 3285 - DNA, 66 bp, synthetic construct
  misc_feature 1..66: note = Synthetic construct
  source 1..66: mol_type = other DNA
tgtgcgagaggatccttggcttatgatactagtggttattactaccgcaacttcttcgacccctgg

SEQ ID NO: 3286 - DNA, 75 bp, synthetic construct
  misc_feature 1..75: note = Synthetic construct
  source 1..75: mol_type = other DNA
tgtgcgagagttcgctacgatttttggagtggttatgagggccggggggaggaccactatcacatggacgtctgg

SEQ ID NO: 3287 - DNA, 45 bp, synthetic construct
  misc_feature 1..45: note = Synthetic construct
  source 1..45: mol_type = other DNA
tgtgtgacagatagcgcagggagcccctatgcctttgatatttgg

SEQ ID NO: 3288 - DNA, 51 bp, synthetic construct
  misc_feature 1..51: note = Synthetic construct
  source 1..51: mol_type = other DNA
tgtgcaacaaaaggaggattttccaattctcggggagttatgaacttctgg

SEQ ID NO: 3289 - DNA, 39 bp, synthetic construct
  misc_feature 1..39: note = Synthetic construct
  source 1..39: mol_type = other DNA
tgtgcgagagggggccgatgggatgcttttgatatctgg

SEQ ID NO: 3290 - DNA, 54 bp, synthetic construct
  misc_feature 1..54: note = Synthetic construct
  source 1..54: mol_type = other DNA
tgtgcgagagacctcccctatacatattgtggtgatgactgctattccctctgg

SEQ ID NO: 3291 - DNA, 57 bp, synthetic construct
  misc_feature 1..57: note = Synthetic construct
  source 1..57: mol_type = other DNA
tgtgcgaggggcaagcagctcgtccggttccactactactactacatggacgtctgg

SEQ ID NO: 3292 - DNA, 75 bp, synthetic construct
  misc_feature 1..75: note = Synthetic construct
  source 1..75: mol_type = other DNA
tgtgcgagaggcaaagggcttgattacgatattttgactggttgggggtggtactactactacatggacgtctgg

SEQ ID NO: 3293 - DNA, 69 bp, synthetic construct
  misc_feature 1..69: note = Synthetic construct
  source 1..69: mol_type = other DNA
tgtgcgagaggctctagtggttcggggagttattatagctactactactactactacatggacgtctgg

SEQ ID NO: 3294 - DNA, 45 bp, synthetic construct
  misc_feature 1..45: note = Synthetic construct
  source 1..45: mol_type = other DNA
tgtgcgagatcggattactatgatagtagtggttatggtctctgg

SEQ ID NO: 3295 - DNA, 42 bp, synthetic construct
  misc_feature 1..42: note = Synthetic construct
  source 1..42: mol_type = other DNA
tgtgcgcgagggactatgatcgcgaaaaactttgactcctgg

SEQ ID NO: 3296 - DNA, 57 bp, synthetic construct
  misc_feature 1..57: note = Synthetic construct
  source 1..57: mol_type = other DNA
tgtgcgagagccggtcggaggccgccctttagtaaccaccctaattttgactcttgg

SEQ ID NO: 3297 - DNA, 51 bp, synthetic construct
  misc_feature 1..51: note = Synthetic construct
  source 1..51: mol_type = other DNA
tgcgtcgctcggagtcccccagcctacttctactactacatgaatgtctgg

SEQ ID NO: 3298 - DNA, 42 bp, synthetic construct
  misc_feature 1..42: note = Synthetic construct
  source 1..42: mol_type = other DNA
tgtgcgaggacaaattacggtgaccaatattttgactactgg

SEQ ID NO: 3299 - DNA, 60 bp, synthetic construct
  misc_feature 1..60: note = Synthetic construct
  source 1..60: mol_type = other DNA
tgtgcgagagcgccggggattgtggcggtcagagccacggagggctggtacgacccctgg

SEQ ID NO: 3300 - DNA, 57 bp, synthetic construct
  misc_feature 1..57: note = Synthetic construct
  source 1..57: mol_type = other DNA
tgtgcgagagaggtcggttgtagtggtattaactgccagggctggttcgacccctgg

SEQ ID NO: 3301 - DNA, 69 bp, synthetic construct
  misc_feature 1..69: note = Synthetic construct
  source 1..69: mol_type = other DNA
tgtgcgagagagaaaattgggcccaaaacttacgatattttgactggttacactatctttgactactgg

SEQ ID NO: 3302 - DNA, 48 bp, synthetic construct
  misc_feature 1..48: note = Synthetic construct
  source 1..48: mol_type = other DNA
tgtgcgagaggggggtatgattacctttgggggagtcatgggtactgg

SEQ ID NO: 3303 - DNA, 54 bp, synthetic construct; identical to SEQ ID NO: 1772
  misc_feature 1..54: note = Synthetic construct
  source 1..54: mol_type = other DNA

SEQ ID NO: 3304 - DNA, 60 bp, synthetic construct
  misc_feature 1..60: note = Synthetic construct
  source 1..60: mol_type = other DNA
tgtgcgagagatctatggtatgattttgatagcagtgctgcggggtcccttgacgactgg

SEQ ID NO: 3305 - DNA, 36 bp, synthetic construct
  misc_feature 1..36: note = Synthetic construct
  source 1..36: mol_type = other DNA
tgtgcgacagacctaggagcaccttcggggcactgg

SEQ ID NO: 3306 - DNA, 51 bp, synthetic construct
  misc_feature 1..51: note = Synthetic construct
  source 1..51: mol_type = other DNA
tgtgcgatagatgtgggggctactgggggggcctactactttgactactgg

SEQ ID NO: 3307 - DNA, 69 bp, synthetic construct
  misc_feature 1..69: note = Synthetic construct
  source 1..69: mol_type = other DNA
tgtgcgagatgtcgtgtaggtcggacaagtatgtctcagcccctaatcggggctgcttttgatatctgg

SEQ ID NO: 3308 - DNA, 36 bp, synthetic construct
  misc_feature 1..36: note = Synthetic construct
  source 1..36: mol_type = other DNA
tgtgcgagagcaaggtacactgtggatgactactgg

SEQ ID NO: 3309 - DNA, 75 bp, synthetic construct
  misc_feature 1..75: note = Synthetic construct
  source 1..75: mol_type = other DNA
tgtgcgagagatggaaattacgatttttggagtggttataacccttttgggtactaccactacatggacgtctgg

SEQ ID NO: 3310 - DNA, 51 bp, synthetic construct
  misc_feature 1..51: note = Synthetic construct
  source 1..51: mol_type = other DNA
tgtgcgagagccccttcggacgcccattactattactatatggacgtctgg

SEQ ID NO: 3311 - DNA, 66 bp, synthetic construct
  misc_feature 1..66: note = Synthetic construct
  source 1..66: mol_type = other DNA
tgtgcgagggaaaattacattttacgatatttaccggtggcccggcggggcgctgttgatatctgg

SEQ ID NO: 3312 - DNA, 57 bp, synthetic construct
  misc_feature 1..57: note = Synthetic construct
  source 1..57: mol_type = other DNA
tgtgctatcttaacattttacgatattttgagtggcccctactcgtttgacttctgg

SEQ ID NO: 3313 - DNA, 54 bp, synthetic construct
  misc_feature 1..54: note = Synthetic construct
  source 1..54: mol_type = other DNA
tgtgcgagagatggggcccggatagtgggactgactcatgcacttgatatttgg

SEQ ID NO: 3314 - DNA, 60 bp, synthetic construct
  misc_feature 1..60: note = Synthetic construct
  source 1..60: mol_type = other DNA
tgtgctcggggaaagagacccggctactgcagcggaggcgtctgttcctctgaatattgg

SEQ ID NO: 3315 - DNA, 60 bp, synthetic construct
  misc_feature 1..60: note = Synthetic construct
  source 1..60: mol_type = other DNA
tgtgctcggggaaagagacccggctactgcagcggaggcgtctgttcctctgactattgg

SEQ ID NO: 3316 - DNA, 57 bp, synthetic construct
  misc_feature 1..57: note = Synthetic construct
  source 1..57: mol_type = other DNA
tgcgcgagacacccggctacatcaatggctggcatgtggggttacattgacacctgg

SEQ ID NO: 3317 - DNA, 57 bp, synthetic construct
  misc_feature 1..57: note = Synthetic construct
  source 1..57: mol_type = other DNA
tgtgcgagagtggtgggcgtccgacactgggagcagttctactacatggacgtctgg

SEQ ID NO: 3318 - DNA, 30 bp, synthetic construct
  misc_feature 1..30: note = Synthetic construct
  source 1..30: mol_type = other DNA
tgtgtgagacgcccctggttcgacccctgg

SEQ ID NO: 3319 - DNA, 75 bp, synthetic construct
  misc_feature 1..75: note = Synthetic construct
  source 1..75: mol_type = other DNA
tgtgcgacagagggcaaaggcgcaagtaaggcatattgtggggatgagtgctccttctcattctttgaccagtgg

SEQ ID NO: 3320 - DNA, 66 bp, synthetic construct
  misc_feature 1..66: note = Synthetic construct
  source 1..66: mol_type = other DNA
tgtgcgagcctagatgaaagacgaggatacagctatggttaccacttctattacatggacgtctgg

SEQ ID NO: 3321 - DNA, 60 bp, synthetic construct
  misc_feature 1..60: note = Synthetic construct
  source 1..60: mol_type = other DNA
tgtgcgagagacttaggtatagcagtggctggtaagagggacgatgcttttgatatctgg

SEQ ID NO: 3322 - DNA, 63 bp, synthetic construct
  misc_feature 1..63: note = Synthetic construct
  source 1..63: mol_type = other DNA
tgtgcgagagagcaaggtcccgaatatagtgggagctactactactactacatggacgtctgg

SEQ ID NO: 3323 - DNA, 57 bp, synthetic construct
  misc_feature 1..57: note = Synthetic construct
  source 1..57: mol_type = other DNA
tgtgcgttcagcgattactctgatagtagcggctattacttcttttttgactactgg

SEQ ID NO: 3324 - DNA, 78 bp, synthetic construct
  misc_feature 1..78: note = Synthetic construct
  source 1..78: mol_type = other DNA
tgtgcgagaccctcgggtagggattactctcgttatggttcgggggggcgaaacttctactactacatggacgtctgg

SEQ ID NO: 3325 - DNA, 60 bp, synthetic construct
  misc_feature 1..60: note = Synthetic construct
  source 1..60: mol_type = other DNA
tgtgcgagagacggggagtattgtggtactgcctgctccatcaactggttcgacccctgg

SEQ ID NO: 3326 - DNA, 51 bp, synthetic construct
  misc_feature 1..51: note = Synthetic construct
  source 1..51: mol_type = other DNA
tgtgcgagagatttccaggcgtcgatggtgagtcctagggtcgcctactgg

SEQ ID NO: 3327 - DNA, 39 bp, synthetic construct
  misc_feature 1..39: note = Synthetic construct
  source 1..39: mol_type = other DNA
tgtgcgagagccgactacggttcctctctggacgtctgg

SEQ ID NO: 3328 - DNA, 57 bp, synthetic construct
  misc_feature 1..57: note = Synthetic construct
  source 1..57: mol_type = other DNA
tgtgcgagagattcagtagtaccagctgctatggagggcaactggttcgacccctgg

SEQ ID NO: 3329 - DNA, 39 bp, synthetic construct
  misc_feature 1..39: note = Synthetic construct
  source 1..39: mol_type = other DNA
tgtgcgagagctgaccttaatggtgcttttgatatctgg

SEQ ID NO: 3330 - DNA, 45 bp, synthetic construct
  misc_feature 1..45: note = Synthetic construct
  source 1..45: mol_type = other DNA
tgtgcgagaggggaagtgggagctacggtccggtttgactactgg

SEQ ID NO: 3331 - DNA, 75 bp, synthetic construct
  misc_feature 1..75: note = Synthetic construct
  source 1..75: mol_type = other DNA
tgtgcgagagtcgtaaagggaaaacagtattacgatattttgactggttattatgagaactggttcgacccctgg

SEQ ID NO: 3332 - DNA, 66 bp, synthetic construct
  misc_feature 1..66: note = Synthetic construct
  source 1..66: mol_type = other DNA
tgtgcgagatctgaacatccctttgactggttattctgttgcgactactactacatggacgtctgg

SEQ ID NO: 3333 - DNA, 42 bp, synthetic construct
  misc_feature 1..42: note = Synthetic construct
  source 1..42: mol_type = other DNA
tgtgcgagagtatcgcccgcgacaatgcgggcagtctactgg

SEQ ID NO: 3334 - DNA, 72 bp, synthetic construct
  misc_feature 1..72: note = Synthetic construct
  source 1..72: mol_type = other DNA
tgtgcggaggactcattttgtggtgatgactgctctcgataccagactcggaggggggcttttaatgtctgg

SEQ ID NO: 3335 - DNA, 45 bp, synthetic construct
  misc_feature 1..45: note = Synthetic construct
  source 1..45: mol_type = other DNA
tgtgcgagaggggattactttgatagtatcggtttacggtactgg

SEQ ID NO: 3336 - DNA, 42 bp, synthetic construct
  misc_feature 1..42: note = Synthetic construct
  source 1..42: mol_type = other DNA
tgtgcgagggaatcgggaggcttttcgggttttgacttctgg

SEQ ID NO: 3337 - DNA, 33 bp, synthetic construct
  misc_feature 1..33: note = Synthetic construct
  source 1..33: mol_type = other DNA
tgtgcgagagaagtagggtggttcgacccctgg

SEQ ID NO: 3338 - DNA, 48 bp, synthetic construct
  misc_feature 1..48: note = Synthetic construct
  source 1..48: mol_type = other DNA
tgtgcgagagaatcctcgttcgggtgggacaatgtcttggacctttgg

SEQ ID NO: 3339 - DNA, 54 bp, synthetic construct
  misc_feature 1..54: note = Synthetic construct
  source 1..54: mol_type = other DNA
tgtgcaaatttattttgtgggggtggtaggtgctattccctgtttgactactgg

SEQ ID NO: 3340 - DNA, 60 bp, synthetic construct
  misc_feature 1..60: note = Synthetic construct
  source 1..60: mol_type = other DNA
tgtgcgaagagatctgggtgggagtacggggggcgttcttcgtactacatggacgtctgg

SEQ ID NO: 3341 - DNA, 48 bp, synthetic construct
  misc_feature 1..48: note = Synthetic construct
  source 1..48: mol_type = other DNA
tgtgcgagagatcaggggatacagattcgtgatgcttttgatctctgg

SEQ ID NO: 3342 - DNA, 60 bp, synthetic construct
  misc_feature 1..60: note = Synthetic construct
  source 1..60: mol_type = other DNA
tgtgcgagagaggcagttacggttcggggaattggcttctactaccacatggacgtctgg

SEQ ID NO: 3343 - DNA, 51 bp, synthetic construct
  misc_feature 1..51: note = Synthetic construct
  source 1..51: mol_type = other DNA
tgtgcgagaggcctagtgggacctcctatttcttcgtacctcgatctctgg

SEQ ID NO: 3344 - DNA, 69 bp, synthetic construct
  misc_feature 1..69: note = Synthetic construct
  source 1..69: mol_type = other DNA
tgtgcgagaacatattgtggtggtgattgctatttgaggggttggatccctgtttcttttgatatctgg

SEQ ID NO: 3345 - DNA, 48 bp, synthetic construct
  misc_feature 1..48: note = Synthetic construct
  source 1..48: mol_type = other DNA
tgtgcgagagactccaaacgtattagtctgtctcaggaagactactgg

SEQ ID NO: 3346 - DNA, 54 bp, synthetic construct
  misc_feature 1..54: note = Synthetic construct
  source 1..54: mol_type = other DNA
tgtgcgagagccgccgagtcggctacatctactcactggtacttcgatctctgg

SEQ ID NO: 3347 - DNA, 42 bp, synthetic construct
  misc_feature 1..42: note = Synthetic construct
  source 1..42: mol_type = other DNA
tgtgcgcgatcaggcggacccgcggcctggctcgacccctgg

SEQ ID NO: 3348 - DNA, 33 bp, synthetic construct
  misc_feature 1..33: note = Synthetic construct
  source 1..33: mol_type = other DNA
tgtgcgactcttggtgacgaccataattcctgg

SEQ ID NO: 3349 - DNA, 51 bp, synthetic construct
  misc_feature 1..51: note = Synthetic construct
  source 1..51: mol_type = other DNA
tgtgcgaccgtcagggagcgcctcggagtctccgggtgcccagcctactgg

SEQ ID NO: 3350 - DNA, 69 bp, synthetic construct
  misc_feature 1..69: note = Synthetic construct
  source 1..69: mol_type = other DNA
tgtgcaacagatataaaagtccacggtgactacagagggccctacttctactactacatgggcgtctgg

SEQ ID NO: 3351 - DNA, 54 bp, synthetic construct
  misc_feature 1..54: note = Synthetic construct
  source 1..54: mol_type = other DNA
tgtgcgagagcgtttgtgtatggttcggggagttgggctgcttttgacatttgg

SEQ ID NO: 3352 - DNA, 51 bp, synthetic construct
  misc_feature 1..51: note = Synthetic construct
  source 1..51: mol_type = other DNA
tgtgcgagagatcgcaaagaattcgaaagacgtcactggttcgacccctgg

SEQ ID NO: 3353 - DNA, 60 bp, synthetic construct
  misc_feature 1..60: note = Synthetic construct
  source 1..60: mol_type = other DNA
tgtgcgagggtaggggacgataacgatttttggagtggtcattccagctttgacttctgg

SEQ ID NO: 3354 - DNA, 60 bp, synthetic construct
  misc_feature 1..60: note = Synthetic construct
  source 1..60: mol_type = other DNA
tgtgcgagagatgaaacggatgtgatggggttcagaatggggtactactttgactcttgg

SEQ ID NO: 3355 - DNA, 51 bp, synthetic construct
  misc_feature 1..51: note = Synthetic construct
  source 1..51: mol_type = other DNA
tgtgcaatcgcaggatcagatagtagctctggattttactttgactactgg

SEQ ID NO: 3356 - DNA, 48 bp, synthetic construct
  misc_feature 1..48: note = Synthetic construct
  source 1..48: mol_type = other DNA
tgtgcaacccagacatatacttcggagagctcccggggtgacttctgg

SEQ ID NO: 3357 - DNA, 39 bp, synthetic construct
  misc_feature 1..39: note = Synthetic construct
  source 1..39: mol_type = other DNA
tgtgcgggaggccgcgggggatatcacgctgactcctgg

SEQ ID NO: 3358 - DNA, 57 bp, synthetic construct
  misc_feature 1..57: note = Synthetic construct
  source 1..57: mol_type = other DNA
tgtgcgcgaggacagactgtcggacgatactttaactggttaccccttcaacactgg

SEQ ID NO: 3359 - DNA, 54 bp, synthetic construct
  misc_feature 1..54: note = Synthetic construct
  source 1..54: mol_type = other DNA
tgtgcgcgacacaggggacgtgggaattctgccggagtggggttcgacccctgg

SEQ ID NO: 3360 - DNA, 60 bp, synthetic construct
  misc_feature 1..60: note = Synthetic construct
  source 1..60: mol_type = other DNA
tgtgcgagagatctttcggaagtggtgggagctgctgtttccgatgcttttaatgtctgg

SEQ ID NO: 3361 - DNA, 45 bp, synthetic construct
  misc_feature 1..45: note = Synthetic construct
  source 1..45: mol_type = other DNA
tgtgcgagagcagatggctaccgaaagaaaatccttgactactgg

SEQ ID NO: 3362 - DNA, 51 bp, synthetic construct
  misc_feature 1..51: note = Synthetic construct
  source 1..51: mol_type = other DNA
tgtgcgagacaatcaggaagtagtggttatatctcctattttaaatactgg

SEQ ID NO: 3363 - DNA, 51 bp, synthetic construct
  misc_feature 1..51: note = Synthetic construct
  source 1..51: mol_type = other DNA
tgtgcgagaggtataagtggaattacctacccgtatcactttgactactgg

SEQ ID NO: 3364 - DNA, 69 bp, synthetic construct
  misc_feature 1..69: note = Synthetic construct
  source 1..69: mol_type = other DNA
tgtgcgacattacgtatgatggattattatgatagtagtggtcattatccggactactttgactactgg

SEQ ID NO: 3365 - DNA, 54 bp, synthetic construct
  misc_feature 1..54: note = Synthetic construct
  source 1..54: mol_type = other DNA
tgtgcgagacgcaacccttatggctccggccggggttataactttgactcctgg

SEQ ID NO: 3366 - DNA, 42 bp, synthetic construct
  misc_feature 1..42: note = Synthetic construct
  source 1..42: mol_type = other DNA
tgtgcgagaactacccagtatttcttctacatggacgtctgg

SEQ ID NO: 3367 - DNA, 81 bp, synthetic construct
  misc_feature 1..81: note = Synthetic construct
  source 1..81: mol_type = other DNA
tgtgcgcgacccgatagtggtgacgaactcatcaatccgggccggccaagtggttattacacgggggctattgatctgtgg

SEQ ID NO: 3368 - DNA, 48 bp, synthetic construct
  misc_feature 1..48: note = Synthetic construct
  source 1..48: mol_type = other DNA
tgtgcgagatcagtgaccagtggctggtatggtactctcgactattgg

SEQ ID NO: 3369 - DNA, 51 bp, synthetic construct
  misc_feature 1..51: note = Synthetic construct
  source 1..51: mol_type = other DNA
tgtgggagaccgcgtaatagtgggagttattatgatgcttttgatatatgg

SEQ ID NO: 3370 - DNA, 51 bp, synthetic construct
  misc_feature 1..51: note = Synthetic construct
  source 1..51: mol_type = other DNA
tgtgcgagacattccttgtctaactttaaacaggcctggttcgacccctgg

SEQ ID NO: 3371 - DNA, 57 bp, synthetic construct
  misc_feature 1..57: note = Synthetic construct
  source 1..57: mol_type = other DNA
tgtgcgagaaatccgggagatgatagtactggtcacccctcttactttaactactgg

SEQ ID NO: 3372 - DNA, 51 bp, synthetic construct
  misc_feature 1..51: note = Synthetic construct
  source 1..51: mol_type = other DNA
tgtgcgagacaagagaggcgtatcggcagtggcaaccccttagagttctgg

SEQ ID NO: 3373 - DNA, 51 bp, synthetic construct
  misc_feature 1..51: note = Synthetic construct
  source 1..51: mol_type = other DNA
tgtgtgagtcccggcgattgtagtggtggtacttgctacccggcctactgg

SEQ ID NO: 3374 - DNA, 42 bp, synthetic construct
  misc_feature 1..42: note = Synthetic construct
  source 1..42: mol_type = other DNA
tgtgcgagacgatttccgaatagtgaacattttgtctactgg

SEQ ID NO: 3375 - DNA, 57 bp, synthetic construct
  misc_feature 1..57: note = Synthetic construct
  source 1..57: mol_type = other DNA
tgtgcgagacatgtggcaactcgtccctactacttctactactacatggacgtctgg

SEQ ID NO: 3376 - DNA, 57 bp, synthetic construct
  misc_feature 1..57: note = Synthetic construct
  source 1..57: mol_type = other DNA
tgtgcgcgacgtaatggttaccatgatagtagtgcttatggcggttttgatatctgg

SEQ ID NO: 3377 - DNA, 54 bp, synthetic construct
  misc_feature 1..54: note = Synthetic construct
  source 1..54: mol_type = other DNA
tgtgcgagaggggaagatgcctacaatactgagcctgatgcttttgatatctgg

SEQ ID NO: 3378 - DNA, 42 bp, synthetic construct
  misc_feature 1..42: note = Synthetic construct
  source 1..42: mol_type = other DNA
tgtgcgaaacatgaagcgcgtgattattactttgactcctgg

SEQ ID NO: 3379 - DNA, 33 bp, synthetic construct
  misc_feature 1..33: note = Synthetic construct
  source 1..33: mol_type = other DNA
tgtgcgagacggaggagcttcgtggacgtctgg

SEQ ID NO: 3380 - DNA, 72 bp, synthetic construct
  misc_feature 1..72: note = Synthetic construct
  source 1..72: mol_type = other DNA
tgtgcgagaagtagagttgtagtagtaccagctgctatgaccccctactactactactacatggacgtctgg

SEQ ID NO: 3381 - DNA, 60 bp, synthetic construct
  misc_feature 1..60: note = Synthetic construct
  source 1..60: mol_type = other DNA
tgtgcgagacataagggaaggggacgtatagcagtggctggtaaagcttttgatatctgg

SEQ ID NO: 3382 - DNA, 42 bp, synthetic construct
  misc_feature 1..42: note = Synthetic construct
  source 1..42: mol_type = other DNA
tgtgcgagacatcggccccactatggcctcatggacgtctgg

SEQ ID NO: 3383 - DNA, 42 bp, synthetic construct
  misc_feature 1..42: note = Synthetic construct
  source 1..42: mol_type = other DNA
tgtgcgagacgtcaggctggagagggcccctttgactactgg

SEQ ID NO: 3384 - DNA, 54 bp, synthetic construct
  misc_feature 1..54: note = Synthetic construct
  source 1..54: mol_type = other DNA
tgtgcgagactggattgtagtggtggtagctgctacccgcccatggacgtctgg

SEQ ID NO: 3385 - DNA, 60 bp, synthetic construct
  misc_feature 1..60: note = Synthetic construct
  source 1..60: mol_type = other DNA
tgtgcgagatccgttcggggagtgggagattactactactactactacatggacgtctgg

SEQ ID NO: 3386 - DNA, 54 bp, synthetic construct
  misc_feature 1..54: note = Synthetic construct
  source 1..54: mol_type = other DNA
tgtgcgagcgtcggctactatggttcggggagttctgatgcttttgatatctgg

SEQ ID NO: 3387 - DNA, 75 bp, synthetic construct
  misc_feature 1..75: note = Synthetic construct
  source 1..75: mol_type = other DNA
tgtgcgagacgagggaaggatgataacagtgcttactacttggggaggacccgaggccgggtatttgactattgg

SEQ ID NO: 3388 - DNA, 39 bp, synthetic construct
  misc_feature 1..39: note = Synthetic construct
  source 1..39: mol_type = other DNA
tgtgcgagacagggcggcagctaccgcattgactactgg

SEQ ID NO: 3389 - DNA, 57 bp, synthetic construct
  misc_feature 1..57: note = Synthetic construct
  source 1..57: mol_type = other DNA
tgtgcgagagtgggggactacggtgactacggtagctactggtacttcgatctctgg

SEQ ID NO: 3390 - DNA, 45 bp, synthetic construct
  misc_feature 1..45: note = Synthetic construct
  source 1..45: mol_type = other DNA
tgtgcccagagtgtaactggagctacagatgcttttgatatttgg

SEQ ID NO: 3391 - DNA, 48 bp, synthetic construct
  misc_feature 1..48: note = Synthetic construct
  source 1..48: mol_type = other DNA
tgtgcgagattggggggtcctacggtgactccccgttttgactactgg

SEQ ID NO: 3392 - DNA, 51 bp, synthetic construct
  misc_feature 1..51: note = Synthetic construct
  source 1..51: mol_type = other DNA
tgtgcgagactggcgatgaaggaatggagtgtcggtgcttttgatctttgg

SEQ ID NO: 3393 - DNA, 45 bp, synthetic construct
  misc_feature 1..45: note = Synthetic construct
  source 1..45: mol_type = other DNA
tgtgcgagagacatgtggggccaccactacgcgttcgacccctgg

SEQ ID NO: 3394 - DNA, 54 bp, synthetic construct
  misc_feature 1..54: note = Synthetic construct
  source 1..54: mol_type = other DNA
tgtgcccgccggtcgcagcagctcctggtccccggatgggcttttgatatctgg

SEQ ID NO: 3395 - DNA, 48 bp, synthetic construct
  misc_feature 1..48: note = Synthetic construct
  source 1..48: mol_type = other DNA
tgtgcgagacttggggattacagtgtctccgatatggggaactactgg

SEQ ID NO: 3396 - DNA, 48 bp, synthetic construct
  misc_feature 1..48: note = Synthetic construct
  source 1..48: mol_type = other DNA
tgtacgtttcggggggcctcttgggggagtcttcgttatagctattgg

SEQ ID NO: 3397 - DNA, 66 bp, synthetic construct
  misc_feature 1..66: note = Synthetic construct
  source 1..66: mol_type = other DNA
tgtgcgaaagatgtggggtattgtagtagtggcagctgcttccgccccctggcttttcaaatctgg

SEQ ID NO: 3398 - DNA, 51 bp, synthetic construct
  misc_feature 1..51: note = Synthetic construct
  source 1..51: mol_type = other DNA
tgtgccacagatcaatgggggtacggtgacttcgggaactttgactactgg

SEQ ID NO: 3399 - DNA, 51 bp, synthetic construct
  misc_feature 1..51: note = Synthetic construct
  source 1..51: mol_type = other DNA
tgtacgcgggttttgtggttcgagggacgatatgatacttttgatgtttgg

SEQ ID NO: 3400 - DNA, 66 bp, synthetic construct
  misc_feature 1..66: note = Synthetic construct
  source 1..66: mol_type = other DNA
tgtgcgtcccgctattgtcgtgctggcagctgctatcaccattactattactatatggacatctgg

SEQ ID NO: 3401 - DNA, 51 bp, synthetic construct
  misc_feature 1..51: note = Synthetic construct
  source 1..51: mol_type = other DNA
tgtgcgaaagggggcggttgtagtggtgattgctattttcccctcgactgg

SEQ ID NO: 3402 - DNA, 54 bp, synthetic construct
  misc_feature 1..54: note = Synthetic construct
  source 1..54: mol_type = other DNA
tgtgcgagaggcctggggtattacgatattttgactggtgcttttgactactgg

SEQ ID NO: 3403 - DNA, 60 bp, synthetic construct
  misc_feature 1..60: note = Synthetic construct
  source 1..60: mol_type = other DNA
tgtgcgaaagatagatcagcctccatatatggtgcggggactcccgcccttgactactgg

SEQ ID NO: 3404 - DNA, 42 bp, synthetic construct
  misc_feature 1..42: note = Synthetic construct
  source 1..42: mol_type = other DNA
tgtgcgaaagatcgtgacttctactacttcatagacgtctgg

SEQ ID NO: 3405 - DNA, 51 bp, synthetic construct
  misc_feature 1..51: note = Synthetic construct
  source 1..51: mol_type = other DNA
tgtgcgaaggcgcgcgtaccagctgctatcagattctactttgactcctgg

SEQ ID NO: 3406 - DNA, 39 bp, synthetic construct
  misc_feature 1..39: note = Synthetic construct
  source 1..39: mol_type = other DNA
tgtgcgagagtcactaggttgaactggttcgacccctgg

SEQ ID NO: 3407 - DNA, 48 bp, synthetic construct
  misc_feature 1..48: note = Synthetic construct
  source 1..48: mol_type = other DNA
tgtgcgcgaaatgaaggatacagctattctaactacatggacgtctgg

SEQ ID NO: 3408 - DNA, 66 bp, synthetic construct
  misc_feature 1..66: note = Synthetic construct
  source 1..66: mol_type = other DNA
tgtgcgagatccccccccccctattactacgccagtagtggttattacttcgcctttgactactgg

SEQ ID NO: 3409 - DNA, 57 bp, synthetic construct
  misc_feature 1..57: note = Synthetic construct
  source 1..57: mol_type = other DNA
tgtgcgagagagaagaacttgtatagtggctacgatccgacgggcttaggctactgg

SEQ ID NO: 3410 - DNA, 45 bp, synthetic construct
  misc_feature 1..45: note = Synthetic construct
  source 1..45: mol_type = other DNA
tgtgcgacctctggttcgggggcttattataaccctgactactgg

SEQ ID NO: 3411 - DNA, 63 bp, synthetic construct
  misc_feature 1..63: note = Synthetic construct
  source 1..63: mol_type = other DNA
tgtgcgacagattccacattttacgatgttttgactactatctgggggtactttgactactgg

SEQ ID NO: 3412 - DNA, 39 bp, synthetic construct
  misc_feature 1..39: note = Synthetic construct
  source 1..39: mol_type = other DNA
tgtgcgacagatagtgcctacgagtactttgactcttgg

SEQ ID NO: 3413 - DNA, 48 bp, synthetic construct
  misc_feature 1..48: note = Synthetic construct
  source 1..48: mol_type = other DNA
tgcgcgagaagggaggcggcgatgagtaatggtaaccttgactactgg

SEQ ID NO: 3414 - DNA, 60 bp, synthetic construct
  misc_feature 1..60: note = Synthetic construct
  source 1..60: mol_type = other DNA
tgtgcgagagaaccatattgtggtggtgattgcccgccgggatattggttcgacccctgg

SEQ ID NO: 3415 - DNA, 60 bp, synthetic construct
  misc_feature 1..60: note = Synthetic construct
  source 1..60: mol_type = other DNA
tgtgcgagagaaggggttaggagcggatacagctatgcctttgatgcttttgatatctgg

SEQ ID NO: 3416 - DNA, 45 bp, synthetic construct
  misc_feature 1..45: note = Synthetic construct
  source 1..45: mol_type = other DNA
tgtgcgagagaatactatggttcggggagttattatacttggtgg

SEQ ID NO: 3417 - DNA, 54 bp, synthetic construct
  misc_feature 1..54: note = Synthetic construct
  source 1..54: mol_type = other DNA
tgtgcgagagatccgaggaggaatcactatgatagtagtggctctgactactgg

SEQ ID NO: 3418 - DNA, 42 bp, synthetic construct
  misc_feature 1..42: note = Synthetic construct
  source 1..42: mol_type = other DNA
tgtgcgagagattttttgggagctagctactttgactactgg

SEQ ID NO: 3419 - DNA, 63 bp, synthetic construct
  misc_feature 1..63: note = Synthetic construct
  source 1..63: mol_type = other DNA
tgtgcgagatccgcccagctctatgatagtagtggttattcggggggcctctttgactactgg

SEQ ID NO: 3420 - DNA, 54 bp, synthetic construct
  misc_feature 1..54: note = Synthetic construct
  source 1..54: mol_type = other DNA
tgtgcgcctttttcgctctacggggggaactactactactacatggacgtctgg

SEQ ID NO: 3421 - DNA, 42 bp, synthetic construct
  misc_feature 1..42: note = Synthetic construct
  source 1..42: mol_type = other DNA
tgtgcgacttcggatcggggaacgactacggtgactccttgg

SEQ ID NO: 3422 - DNA, 84 bp, synthetic construct
  misc_feature 1..84: note = Synthetic construct
  source 1..84: mol_type = other DNA
tgtgcgagattttcggccggaaggcctcaatattgtagtggtggtacctgctaccctccggacttctattacatggacgtctgg

SEQ ID NO: 3423 - DNA, 57 bp, synthetic construct
  misc_feature 1..57: note = Synthetic construct
  source 1..57: mol_type = other DNA
tgtgcgagagatcgaggtagcagcagctggtacgggggcgatgcttttgatttctgg

SEQ ID NO: 3424 - DNA, 30 bp, synthetic construct
  misc_feature 1..30: note = Synthetic construct
  source 1..30: mol_type = other DNA
tgtgcgagagggggactacggcgaaactgg

SEQ ID NO: 3425 - DNA, 39 bp, synthetic construct
  misc_feature 1..39: note = Synthetic construct
  source 1..39: mol_type = other DNA
tgtgcgagagatgaccgctacggtgaccttgatttttgg

SEQ ID NO: 3426 - DNA, 75 bp, synthetic construct
  misc_feature 1..75: note = Synthetic construct
  source 1..75: mol_type = other DNA
tgtgcgagagggcccaattactatgatagtagaaatcattactcgccaccactcgaccagtacatggacgtctgg

SEQ ID NO: 3427 - DNA, 36 bp, synthetic construct
  misc_feature 1..36: note = Synthetic construct
  source 1..36: mol_type = other DNA
tgtgcgagcgggaacggtgacttcgtgtacttctgg

SEQ ID NO: 3428 - DNA, 63 bp, synthetic construct
  misc_feature 1..63: note = Synthetic construct
  source 1..63: mol_type = other DNA
tgtgcgagagaggacagagctgtggctggtccctggtcctcctactacttcatggacgtctgg

SEQ ID NO: 3429 - DNA, 27 bp, synthetic construct
  misc_feature 1..27: note = Synthetic construct
  source 1..27: mol_type = other DNA
tgtgcgagagacgagaacgactactgg

SEQ ID NO: 3430 - DNA, 42 bp, synthetic construct
  misc_feature 1..42: note = Synthetic construct
  source 1..42: mol_type = other DNA
tgtgcgagagatacaggatatacccggaaacttgactactgg

SEQ ID NO: 3431 - DNA, 69 bp, synthetic construct
  misc_feature 1..69: note = Synthetic construct
  source 1..69: mol_type = other DNA
tgtgcgagagatcactacggtggtaaatccggaagcggatactactactactactacatggacgtctgg

SEQ ID NO: 3432 - DNA, 27 bp, synthetic construct
  misc_feature 1..27: note = Synthetic construct
  source 1..27: mol_type = other DNA
tgtgcgagagctttcctggacgtctgg

SEQ ID NO: 3433 - DNA, 63 bp, synthetic construct
  misc_feature 1..63: note = Synthetic construct
  source 1..63: mol_type = other DNA
tgtgcgagagggggcgactacgggggaacctgggcgtactactactactacatggacgtctgg

SEQ ID NO: 3434 - DNA, 66 bp, synthetic construct
  misc_feature 1..66: note = Synthetic construct
  source 1..66: mol_type = other DNA
tgtgcgagaggtccttattactatgatagtagtagttattacccaaaagaatacttccagcactgg

SEQ ID NO: 3435 - DNA, 66 bp, synthetic construct
  misc_feature 1..66: note = Synthetic construct
  source 1..66: mol_type = other DNA
tgtgcgagagttggtgatgatagtagtggttggggttactactactactactacatggacgtctgg

SEQ ID NO: 3436 - DNA, 48 bp, synthetic construct
  misc_feature 1..48: note = Synthetic construct
  source 1..48: mol_type = other DNA
tgtgcgagggagaattactatggttcggggagttatttgggctactgg

SEQ ID NO: 3437 - DNA, 33 bp, synthetic construct
  misc_feature 1..33: note = Synthetic construct
  source 1..33: mol_type = other DNA
tgtgcgaggggttatggttcgggggactactgg

SEQ ID NO: 3438 - DNA, 60 bp, synthetic construct
  misc_feature 1..60: note = Synthetic construct
  source 1..60: mol_type = other DNA
tgtgcgagagttgggagtctttttgaactaaatggccgggagtcgggtctcgacccctgg

SEQ ID NO: 3439 - DNA, 54 bp, synthetic construct
  misc_feature 1..54: note = Synthetic construct
  source 1..54: mol_type = other DNA
tgtacgagagttttcggattttcggcttggaacttcggtgacttttactactgg

SEQ ID NO: 3440 - DNA, 66 bp, synthetic construct
  misc_feature 1..66: note = Synthetic construct
  source 1..66: mol_type = other DNA
tgtgcgagagatcccctttattactatgatagtggtggttattaccatgatgcttttgatatctgg

SEQ ID NO: 3441 - DNA, 45 bp, synthetic construct
  misc_feature 1..45: note = Synthetic construct
  source 1..45: mol_type = other DNA
tgtgcgagtcgccccgaatatacgtttggttactttgactcctgg

SEQ ID NO: 3442 - DNA, 42 bp, synthetic construct
  misc_feature 1..42: note = Synthetic construct
  source 1..42: mol_type = other DNA
tgtgcgagagacatagactggaactacggacttgactcctgg

SEQ ID NO: 3443 - DNA, 57 bp, synthetic construct
  misc_feature 1..57: note = Synthetic construct
  source 1..57: mol_type = other DNA
tgtgcgaaagtgggcaaccgggtcccgacgaggaggggtggggcttttgatatttgg

SEQ ID NO: 3444 - DNA, 66 bp, synthetic construct
  misc_feature 1..66: note = Synthetic construct
  source 1..66: mol_type = other DNA
tgtgcgagagatcgggcacactgtactaatagcagctgcttttcggggggctggttcgactcctgg

SEQ ID NO: 3445 - DNA, 66 bp, synthetic construct
  misc_feature 1..66: note = Synthetic construct
  source 1..66: mol_type = other DNA
tgtgcgagaggttgggtggggcaggaccccactgcttaccgcacagggggctactttgactcctgg

SEQ ID NO: 3446 - DNA, 66 bp, synthetic construct
  misc_feature 1..66: note = Synthetic construct
  source 1..66: mol_type = other DNA
tgtgcgagagatttggacggttactatggttcgggaagttattatcccgatgcttttgatatctgg

SEQ ID NO: 3447 - DNA, 51 bp, synthetic construct
  misc_feature 1..51: note = Synthetic construct
  source 1..51: mol_type = other DNA
tgtgcgagagtggtcggcagcagctcctactactaccacattgacgtctgg

SEQ ID NO: 3448 - DNA, 45 bp, synthetic construct
  misc_feature 1..45: note = Synthetic construct
  source 1..45: mol_type = other DNA
tgtgcgagagggggagaatcttactactggtacatggacgtctgg

SEQ ID NO: 3449 - DNA, 54 bp, synthetic construct
  misc_feature 1..54: note = Synthetic construct
  source 1..54: mol_type = other DNA
tgtgcaagagaagcccgctatggttcggggagcccttggtacatggacgtctgg

SEQ ID NO: 3450 - DNA, 51 bp, synthetic construct
  misc_feature 1..51: note = Synthetic construct
  source 1..51: mol_type = other DNA
tgtgcgagagccatagagatgtctactacggatggtgctttagatctctgg

SEQ ID NO: 3451 - DNA, 45 bp, synthetic construct
  misc_feature 1..45: note = Synthetic construct
  source 1..45: mol_type = other DNA
tgtgtgcgtgctgacgactcttatcactactacatgttggactgg

SEQ ID NO: 3452 - DNA, 69 bp, synthetic construct
  misc_feature 1..69: note = Synthetic construct
  source 1..69: mol_type = other DNA
tgtgtgagagataattactttgatagtagtggttattacctttacggaccccactactttgactactgg

SEQ ID NO: 3453 - DNA, 66 bp, synthetic construct
  misc_feature 1..66: note = Synthetic construct
  source 1..66: mol_type = other DNA
tgtgcgaggttccacagggaaacatactgtggtggtgattgctattcggggacttttgatgtctgg

SEQ ID NO: 3454 - DNA, 72 bp, synthetic construct
  misc_feature 1..72: note = Synthetic construct
  source 1..72: mol_type = other DNA
tgtgtgaggggggccccacattcgcagtataccagtttttggttctatagttactacttcatggacgtctgg

SEQ ID NO: 3455 - DNA, 39 bp, synthetic construct
  misc_feature 1..39: note = Synthetic construct
  source 1..39: mol_type = other DNA
tgtaccacagtacataccattaggggctttgactactgg

SEQ ID NO: 3456 - DNA, 48 bp, synthetic construct
  misc_feature 1..48: note = Synthetic construct
  source 1..48: mol_type = other DNA
tgtgtgcgagcttggcagcaactggtatggggaggtcttgatatctgg

SEQ ID NO: 3457 - DNA, 63 bp, synthetic construct
  misc_feature 1..63: note = Synthetic construct
  source 1..63: mol_type = other DNA
tgtgcgagagatctccgagatgagagtgttgacgagtactactattactacatggacgtctgg

SEQ ID NO: 3458 - DNA, 60 bp, synthetic construct
  misc_feature 1..60: note = Synthetic construct
  source 1..60: mol_type = other DNA
tgtgcgagagaagggatggctacaaggggttactactactactactacatggacgtctgg

SEQ ID NO: 3459 - DNA, 39 bp, synthetic construct
  misc_feature 1..39: note = Synthetic construct
  source 1..39: mol_type = other DNA
tgtgcgagagacctcgtagtaggtgcttttgatatctgg

SEQ ID NO: 3460 - DNA, 78 bp, synthetic construct
  misc_feature 1..78: note = Synthetic construct
  source 1..78: mol_type = other DNA
tgtgcgagaggccatgatagtagtggttattacttttttttgggggtgggctactactactactacatggacgtctgg

SEQ ID NO: 3461 - DNA, 63 bp, synthetic construct
  misc_feature 1..63: note = Synthetic construct
  source 1..63: mol_type = other DNA
tgtgcgagaggtcttatagcagatagtagtggttattacaagttacggctatttgactactgg

SEQ ID NO: 3462 - DNA, 45 bp, synthetic construct
  misc_feature 1..45: note = Synthetic construct
  source 1..45: mol_type = other DNA
tgtgcgagatcaccaacgggttatccctactactttgactactgg

SEQ ID NO: 3463 - DNA, 45 bp, synthetic construct
  misc_feature 1..45: note = Synthetic construct
  source 1..45: mol_type = other DNA
tgtgcgagagatcctgactatgatactagtggtccagactactgg

SEQ ID NO: 3464 - DNA, 45 bp, synthetic construct
  misc_feature 1..45: note = Synthetic construct
  source 1..45: mol_type = other DNA
tgtgcgagagatgatggaggggggtactggggcttagacctctgg

SEQ ID NO: 3465 - DNA, 81 bp, synthetic construct
  misc_feature 1..81: note = Synthetic construct
  source 1..81: mol_type = other DNA
tgtgcgtccctaggacattgtcgtagtggcagctgtttagtccgaccagctgaggtctcgcagacctggttcgacccctgg

SEQ ID NO: 3466 - DNA, 54 bp, synthetic construct
  misc_feature 1..54: note = Synthetic construct
  source 1..54: mol_type = other DNA
tgtgcgaaagatcgcagcctctccggatatagcagcagttgccacctcgactgg

SEQ ID NO: 3467 - DNA, 54 bp, synthetic construct
  misc_feature 1..54: note = Synthetic construct
  source 1..54: mol_type = other DNA
tgtgcgagaggcctttatgagggatttgaatcaagtggtttttacagattctgg

SEQ ID NO: 3468 - DNA, 45 bp, synthetic construct
  misc_feature 1..45: note = Synthetic construct
  source 1..45: mol_type = other DNA
tgtgttaaagctgagggcccgtatggtggctactttgaccaatgg

SEQ ID NO: 3469 - DNA, 45 bp, synthetic construct
  misc_feature 1..45: note = Synthetic construct
  source 1..45: mol_type = other DNA
tgtgcgaaagtgaagtttggctatggctcccattttgatatctgg

SEQ ID NO: 3470 - DNA, 51 bp, synthetic construct
  misc_feature 1..51: note = Synthetic construct
  source 1..51: mol_type = other DNA
tgtgctagagtagaatcgtactactatgacagtagtgctgttgactactgg

SEQ ID NO: 3471 - DNA, 57 bp, synthetic construct
  misc_feature 1..57: note = Synthetic construct
  source 1..57: mol_type = other DNA
tgcgcgaaatacaaccctcggggctacggtgactacgcggggtacctcgacccctgg

SEQ ID NO: 3472 - DNA, 51 bp, synthetic construct
  misc_feature 1..51: note = Synthetic construct
  source 1..51: mol_type = other DNA
tgtgcgaaaatcaggccaatgactacggtgacgagctcctttgactactgg

SEQ ID NO: 3473 - DNA, 60 bp, synthetic construct
  misc_feature 1..60: note = Synthetic construct
  source 1..60: mol_type = other DNA
tgtgcgagagataccgctacattacgaagtcacgggggggccggctggttcgccccctgg

SEQ ID NO: 3474 - DNA, 54 bp, synthetic construct
  misc_feature 1..54: note = Synthetic construct
  source 1..54: mol_type = other DNA
tgtgcgaaaccggggggctatggttcggggagtgatggtgcttttgatatctgg

SEQ ID NO: 3475 - DNA, 51 bp, synthetic construct
  misc_feature 1..51: note = Synthetic construct
  source 1..51: mol_type = other DNA
tgtacgaatattcgagacgcatacagtgtcggttatggacttgattcctgg

SEQ ID NO: 3476 - DNA, 48 bp, synthetic construct
  misc_feature 1..48: note = Synthetic construct
  source 1..48: mol_type = other DNA
tgtgcgaaaaggcaggcttatagcagctcgtcccccttgggccactgg

SEQ ID NO: 3477 - DNA, 57 bp, synthetic construct
  misc_feature 1..57: note = Synthetic construct
  source 1..57: mol_type = other DNA
tgtgcgaaagatgtcagcaactacgggatttactattactactacatggacgtctgg

SEQ ID NO: 3478 - DNA, 48 bp, synthetic construct
  misc_feature 1..48: note = Synthetic construct
  source 1..48: mol_type = other DNA
tgtgcgagttcggatgactacagtaactacggtccatttgactactgg

SEQ ID NO: 3479 - DNA, 54 bp, synthetic construct
  misc_feature 1..54: note = Synthetic construct
  source 1..54: mol_type = other DNA
tgtgctagaggtccccccagtggatacacctttggttcctactttgactcctgg

SEQ ID NO: 3480 - DNA, 54 bp, synthetic construct
  misc_feature 1..54: note = Synthetic construct
  source 1..54: mol_type = other DNA
tgtgcgagaggagtcactagtggttaccactcttaccccctccttgacttctgg

SEQ ID NO: 3481 - DNA, 66 bp, synthetic construct
  misc_feature 1..66: note = Synthetic construct
  source 1..66: mol_type = other DNA
tgtgcccgagctcggggaacatataactgggactctggggcctactcttacttcatggacgtctgg

SEQ ID NO: 3482 - DNA, 51 bp, synthetic construct
  misc_feature 1..51: note = Synthetic construct
  source 1..51: mol_type = other DNA
tgtgcgaaaattaggccaatgactacggtgacgagcgcgtttgacctctgg

SEQ ID NO: 3483 - DNA, 39 bp, synthetic construct
  misc_feature 1..39: note = Synthetic construct
  source 1..39: mol_type = other DNA
tgtggaagagatccgggatacagtagcttggacgtctgg

SEQ ID NO: 3484 - DNA, 66 bp, synthetic construct
  misc_feature 1..66: note = Synthetic construct
  source 1..66: mol_type = other DNA
tgtgctcgaggtcggggaacctatgactggaactccggggcctactactacttcatggacgtgtgg

SEQ ID NO: 3485 - DNA, 84 bp, synthetic construct
  misc_feature 1..84: note = Synthetic construct
  source 1..84: mol_type = other DNA
tgcacgagaggaggcggccatttgctccgggcaggctatgagtggtccccgggagatcaaacattccacttcatgaacgtctgg

SEQ ID NO: 3486 - DNA, 36 bp, synthetic construct
  misc_feature 1..36: note = Synthetic construct
  source 1..36: mol_type = other DNA
tgtgcgacttatcccacgggcattttgaactcctgg

SEQ ID NO: 3487 - DNA, 45 bp, synthetic construct
  misc_feature 1..45: note = Synthetic construct
  source 1..45: mol_type = other DNA
tgtgcggcctcttacaatatccagggtttggtccttgactactgg

SEQ ID NO: 3488 - DNA, 51 bp, synthetic construct
  misc_feature 1..51: note = Synthetic construct
  source 1..51: mol_type = other DNA
tgtgcgaaacacaaaggggagtcctatatttcttgggctcttgatttgtgg

SEQ ID NO: 3489 - DNA, 60 bp, synthetic construct
  misc_feature 1..60: note = Synthetic construct
  source 1..60: mol_type = other DNA
tgtgcgaaaaccccctcaagaagtgtaagcagtagctggccctattactttgactattgg

SEQ ID NO: 3490 - DNA, 72 bp, synthetic construct
  misc_feature 1..72: note = Synthetic construct
  source 1..72: mol_type = other DNA
tgtgcgaggaacgtatattgtagtggtggtagctgctactccgactactactactactacatggacgtctgg

SEQ ID NO: 3491 - DNA, 54 bp, synthetic construct
  misc_feature 1..54: note = Synthetic construct
  source 1..54: mol_type = other DNA
tgtgcgagaccagaaagtgggagctactactcgccctggttcttcgaatgctgg

SEQ ID NO: 3492 - DNA, 48 bp, synthetic construct
  misc_feature 1..48: note = Synthetic construct
  source 1..48: mol_type = other DNA
tgtgcgagagacaagtatagtgggaccacggatgcttttgatatctgg

SEQ ID NO: 3493 - DNA, 51 bp, synthetic construct
  misc_feature 1..51: note = Synthetic construct
  source 1..51: mol_type = other DNA
tgtgcgagagacccacgagcgtataccgatccccgctggttcgacccctgg

SEQ ID NO: 3494 - DNA, 45 bp, synthetic construct
  misc_feature 1..45: note = Synthetic construct
  source 1..45: mol_type = other DNA
tgtgcgagagcgggggggttcatggttcggggactcgactactgg

SEQ ID NO: 3495 - DNA, 63 bp, synthetic construct
  misc_feature 1..63: note = Synthetic construct
  source 1..63: mol_type = other DNA
tgtgcgagagaaataagaggcgtgggctatagtagtggttattacggctggttcgacccctgg

SEQ ID NO: 3496 - DNA, 45 bp, synthetic construct
  misc_feature 1..45: note = Synthetic construct
  source 1..45: mol_type = other DNA
tgtgcgagagtccgtacgtccctctactactacatggacgtctgg

SEQ ID NO: 3497 - DNA, 51 bp, synthetic construct
  misc_feature 1..51: note = Synthetic construct
  source 1..51: mol_type = other DNA
tgtgcgagagatggtgtactactacgaagcttaaagcggttcgacccctgg

SEQ ID NO: 3498 - DNA, 45 bp, synthetic construct
  misc_feature 1..45: note = Synthetic construct
  source 1..45: mol_type = other DNA
tgtgcgagagggtgggcaacagatggctactacatggacctctgg

SEQ ID NO: 3499 - DNA, 72 bp, synthetic construct
  misc_feature 1..72: note = Synthetic construct
  source 1..72: mol_type = other DNA
tgtgcgaaagggggtccagatgcggctgtctggacgaattctcaactctcttttcatccctttgtctcgtgg

SEQ ID NO: 3500 - DNA, 48 bp, synthetic construct
  misc_feature 1..48: note = Synthetic construct
  source 1..48: mol_type = other DNA
tgcgcgaaagtaagactgatacggcccgaggggttctttgactattgg

SEQ ID NO: 3501 - DNA, 60 bp, synthetic construct
  misc_feature 1..60: note = Synthetic construct
  source 1..60: mol_type = other DNA
tgtgcgaaagacctctcttgtggtggtggtagctgtttttcccgggtttctgactactgg

SEQ ID NO: 3502 - DNA, 90 bp, synthetic construct
  misc_feature 1..90: note = Synthetic construct
  source 1..90: mol_type = other DNA
tgtgcgagaggcaaaacttcttactatgatagagacaaaccgttttactatgatagtagtggtaagggtccccactgctttgactactgg

SEQ ID NO: 3503 - DNA, 54 bp, synthetic construct
  misc_feature 1..54: note = Synthetic construct
  source 1..54: mol_type = other DNA
tgtaccacagattggggttcgacgactcattatattcaggcttttgatatctgg

SEQ ID NO: 3504 - DNA, 51 bp, synthetic construct
  misc_feature 1..51: note = Synthetic construct
  source 1..51: mol_type = other DNA
tgtactagagattgggactactatgatagtagtggttactccagtcactgg

SEQ ID NO: 3505 - DNA, 63 bp, synthetic construct
  misc_feature 1..63: note = Synthetic construct
  source 1..63: mol_type = other DNA
tgtactagaccggcggctgatagcagcagctggtacagccgccttacctactttgactactgg

SEQ ID NO: 3506 - DNA, 42 bp, synthetic construct
  misc_feature 1..42: note = Synthetic construct
  source 1..42: mol_type = other DNA
tgtactagagagctctccatagagggagcttttgatatctgg

SEQ ID NO: 3507 - DNA, 57 bp, synthetic construct
  misc_feature 1..57: note = Synthetic construct
  source 1..57: mol_type = other DNA
tgtactagagatcttctcggggtcttctcggaggggattggttggttcgacccctgg

SEQ ID NO: 3508 - DNA, 60 bp, synthetic construct
  misc_feature 1..60: note = Synthetic construct
  source 1..60: mol_type = other DNA
tgtactagagccccggggaggggatttaggtatggttcggggagccactttgactactgg

SEQ ID NO: 3509 - DNA, 48 bp, synthetic construct
  misc_feature 1..48: note = Synthetic construct
  source 1..48: mol_type = other DNA
tgtgcgagaggggtggctacgacctaccaatatcactttgacttctgg

SEQ ID NO: 3510 - DNA, 63 bp, synthetic construct
  misc_feature 1..63: note = Synthetic construct
  source 1..63: mol_type = other DNA
tgtgcgagagatcgcatcagttttacgactggtgtggtcccggactggaacttcgatctctgg

SEQ ID NO: 3511 - DNA, 60 bp, synthetic construct
  misc_feature 1..60: note = Synthetic construct
  source 1..60: mol_type = other DNA
tgtgcgaaacatttaacgaccagtattgttgtggtggtagctgcacgatttgtctcctgg

SEQ ID NO: 3512 - DNA, 48 bp, synthetic construct
  misc_feature 1..48: note = Synthetic construct
  source 1..48: mol_type = other DNA
tgtgcgaagttggactacagtaacttacgacagagatttgactactgg

SEQ ID NO: 3513 - DNA, 42 bp, synthetic construct
  misc_feature 1..42: note = Synthetic construct
  source 1..42: mol_type = other DNA
tgtgcgaaagatccctcctctatagtgggagccttcgactgg

SEQ ID NO: 3514 - DNA, 33 bp, synthetic construct
  misc_feature 1..33: note = Synthetic construct
  source 1..33: mol_type = other DNA
tgtgcgaagcctatagcaggtcgtccttccgtg

SEQ ID NO: 3515 - DNA, 51 bp, synthetic construct
  misc_feature 1..51: note = Synthetic construct
  source 1..51: mol_type = other DNA
tgtgcgaaaccgaaggaggaagagccctcatactactacatggacgtctgg

SEQ ID NO: 3516 - DNA, 39 bp, synthetic construct
  misc_feature 1..39: note = Synthetic construct
  source 1..39: mol_type = other DNA
tgtgcgaaagataaacgggctgcccccttagactactgg

SEQ ID NO: 3517 - DNA, 57 bp, synthetic construct
  misc_feature 1..57: note = Synthetic construct
  source 1..57: mol_type = other DNA
tgtgcgaaagattactatggttcggggacttattatatgggagcttttgatatctgg

SEQ ID NO: 3518 - DNA, 48 bp, synthetic construct
  misc_feature 1..48: note = Synthetic construct
  source 1..48: mol_type = other DNA
tgtgccagggaggacagcagtggctggtatgatgcttttgatatctgg

SEQ ID NO: 3519 - DNA, 51 bp, synthetic construct
  misc_feature 1..51: note = Synthetic construct
  source 1..51: mol_type = other DNA
tgtgcgaaacgggggcctgatagtagtgggtcgggcgcttttgatatctgg

SEQ ID NO: 3520 - DNA, 48 bp, synthetic construct
  misc_feature 1..48: note = Synthetic construct
  source 1..48: mol_type = other DNA
tgtgcgaaagagggtagtggttattactcaaactggttcgacccctgg

SEQ ID NO: 3521 - DNA, 57 bp, synthetic construct
  misc_feature 1..57: note = Synthetic construct
  source 1..57: mol_type = other DNA
tgtgcgaaagatcgagggaagatttactatgatagtagtggccaacaggactactgg

SEQ ID NO: 3522 - DNA, 60 bp, synthetic construct
  misc_feature 1..60: note = Synthetic construct
  source 1..60: mol_type = other DNA
tgtgcgaaagatcgggcattacgatattttgactggttatttgatgcttttgatatctgg

SEQ ID NO: 3523 - DNA, 45 bp, synthetic construct
  misc_feature 1..45: note = Synthetic construct
  source 1..45: mol_type = other DNA
tgtgcgaaagccccaggatatagcaatactgcttttgatttctgg

SEQ ID NO: 3524 - DNA, 51 bp, synthetic construct
  misc_feature 1..51: note = Synthetic construct
  source 1..51: mol_type = other DNA
tgtgcgaaagtcggggacgtattacgatattttgactggtatgactactgg

SEQ ID NO: 3525 - DNA, 48 bp, synthetic construct
  misc_feature 1..48: note = Synthetic construct
  source 1..48: mol_type = other DNA
tgtgcgaaatgggggctatggttcggggagttggactttgactactgg

SEQ ID NO: 3526 - DNA, 51 bp, synthetic construct
  misc_feature 1..51: note = Synthetic construct
  source 1..51: mol_type = other DNA
tgtgcgaatcccgattacgatattttgactgtgaactggttcgacccctgg

SEQ ID NO: 3527 - DNA, 36 bp, synthetic construct
  misc_feature 1..36: note = Synthetic construct
  source 1..36: mol_type = other DNA
tgtgcgaatcttataggagggtactttggctactgg

SEQ ID NO: 3528 - DNA, 69 bp, synthetic construct
  misc_feature 1..69: note = Synthetic construct
  source 1..69: mol_type = other DNA
tgtgcgaagacagcatattgtggtggggattgctcttctagagtcactgcatacttctttgactcctgg

SEQ ID NO: 3529 - DNA, 48 bp, synthetic construct
  misc_feature 1..48: note = Synthetic construct
  source 1..48: mol_type = other DNA
tgtgcgaaatcccgggcagtggctgggtacgattactttgactactgg

SEQ ID NO: 3530 - DNA, 48 bp, synthetic construct
  misc_feature 1..48: note = Synthetic construct
  source 1..48: mol_type = other DNA
tgtgcgagaaggcagggctacagtagttcgtccccgttgaaatactgg

SEQ ID NO: 3531 - DNA, 60 bp, synthetic construct
  misc_feature 1..60: note = Synthetic construct
  source 1..60: mol_type = other DNA
tgtgcgagagacttttggggttactatggttcggggattagaaaagagtttgatatctgg

SEQ ID NO: 3532 - DNA, 60 bp, synthetic construct
  misc_feature 1..60: note = Synthetic construct
  source 1..60: mol_type = other DNA
tgtgcgagtcgaggaattaacggggggttcggggaagatgaggaatacttccaccactgg

SEQ ID NO: 3533 - DNA, 48 bp, synthetic construct; identical to SEQ ID NO: 1771
  misc_feature 1..48: note = Synthetic construct
  source 1..48: mol_type = other DNA

SEQ ID NO: 3534 - DNA, 66 bp, synthetic construct
  misc_feature 1..66: note = Synthetic construct
  source 1..66: mol_type = other DNA
tgtgcgagagatgggtcttgtgattacatttgggggggttatcgttatgatgcttttgatatttgg

SEQ ID NO: 3535 - DNA, 57 bp, synthetic construct
  misc_feature 1..57: note = Synthetic construct
  source 1..57: mol_type = other DNA
tgtgcgagccatccttatgggaggtatagcagtggctggggggcctttgactactgg

SEQ ID NO: 3536 - DNA, 66 bp, synthetic construct
  misc_feature 1..66: note = Synthetic construct
  source 1..66: mol_type = other DNA
tgtgcgagacagcgaagcgagtggatagtagtggttattacgggctactactacatggacgtctgg

SEQ ID NO: 3537 - DNA, 72 bp, synthetic construct
  misc_feature 1..72: note = Synthetic construct
  source 1..72: mol_type = other DNA
tgtgcgagagatcgcggacaccccaattactatggttcggggagttattaccgctactactttgactactgg

SEQ ID NO: 3538 - DNA, 39 bp, synthetic construct
  misc_feature 1..39: note = Synthetic construct
  source 1..39: mol_type = other DNA
tgtgcgcgacggtcgtatagtggctactttgactcctgg

SEQ ID NO: 3539 - DNA, 36 bp, synthetic construct
  misc_feature 1..36: note = Synthetic construct
  source 1..36: mol_type = other DNA
tgtgcgaccctgaagtggaattccttagactcctgg

SEQ ID NO: 3540 - DNA, 57 bp, synthetic construct
  misc_feature 1..57: note = Synthetic construct
  source 1..57: mol_type = other DNA
tgtaccacagggttcgattttggagtggttattattgtcgatggcatggacgtctgg

SEQ ID NO: 3541 - DNA, 69 bp, synthetic construct
  misc_feature 1..69: note = Synthetic construct
  source 1..69: mol_type = other DNA
tgtaccacagtcccttattgtagtggtggtagctgctacggggactactactactacatggacgtctgg

SEQ ID NO: 3542 - DNA, 60 bp, synthetic construct
  misc_feature 1..60: note = Synthetic construct
  source 1..60: mol_type = other DNA
tgtaccacctcaatcgaattactatggttcggggagcccctcggcgcttttgatatctgg

SEQ ID NO: 3543 - DNA, 51 bp, synthetic construct
  misc_feature 1..51: note = Synthetic construct
  source 1..51: mol_type = other DNA
tgtaccactttacggtcaggggactactacttctactacatggacgtctgg

SEQ ID NO: 3544 - DNA, 48 bp, synthetic construct
  misc_feature 1..48: note = Synthetic construct
  source 1..48: mol_type = other DNA
tgtaccacagagggcggcagtggctggtttgggtactttgactactgg

SEQ ID NO: 3545 - DNA, 30 bp, synthetic construct
  misc_feature 1..30: note = Synthetic construct
  source 1..30: mol_type = other DNA
tgtagtagagactggggcattgcactctgg

SEQ ID NO: 3546 - DNA, 66 bp, synthetic construct
  misc_feature 1..66: note = Synthetic construct
  source 1..66: mol_type = other DNA
tgtgcgaaagatgggggaagaacgtcttactatgatactagtgcttattactactttgactactgg

SEQ ID NO: 3547 - DNA, 69 bp, synthetic construct
  misc_feature 1..69: note = Synthetic construct
  source 1..69: mol_type = other DNA
tgtgcgagagaagatcgtggatattgtagtagtggtagctgctactttgtagggacctttgactactgg

SEQ ID NO: 3548 - DNA, 33 bp, synthetic construct
  misc_feature 1..33: note = Synthetic construct
  source 1..33: mol_type = other DNA
tgtgcgcgagggtcccgggaggttctctactgg

SEQ ID NO: 3549 - DNA, 60 bp, synthetic construct
  misc_feature 1..60: note = Synthetic construct
  source 1..60: mol_type = other DNA
tgtgcgagaggaggggcccattattgtggtggtgactgcccgagggcttttgacatctgg

SEQ ID NO: 3550 - DNA, 39 bp, synthetic construct
  misc_feature 1..39: note = Synthetic construct
  source 1..39: mol_type = other DNA
tgtgcgagtctctggtcccgttactactttgacttctgg

SEQ ID NO: 3551 - DNA, 48 bp, synthetic construct
  misc_feature 1..48: note = Synthetic construct
  source 1..48: mol_type = other DNA
tgtgcgagagcgacgggtgggaccttctactaccatatggacgtctgg

SEQ ID NO: 3552 - DNA, 87 bp, synthetic construct
  misc_feature 1..87: note = Synthetic construct
  source 1..87: mol_type = other DNA
tgtgtaaaacaggctctgaatactgggtacgattcgactttttcaccctttgtctctatctactactacttctacatggacgtctgg

SEQ ID NO: 3553 - DNA, 54 bp, synthetic construct
  misc_feature 1..54: note = Synthetic construct
  source 1..54: mol_type = other DNA
tgtgggagactctgccaggcgttttggtccggggaacattgtggggactcctgg

SEQ ID NO: 3554 - DNA, 63 bp, synthetic construct
  misc_feature 1..63: note = Synthetic construct
  source 1..63: mol_type = other DNA
tgtgcgacacacgtctcgctccattgtggttctaattgctattcggaatatttccatcactgg

SEQ ID NO: 3555 - DNA, 39 bp, synthetic construct
  misc_feature 1..39: note = Synthetic construct
  source 1..39: mol_type = other DNA
tgtatttcggctgctacggatgagctctttgagtactgg

SEQ ID NO: 3556 - DNA, 60 bp, synthetic construct
  misc_feature 1..60: note = Synthetic construct
  source 1..60: mol_type = other DNA
tgttcaaagaatcagtttgatagtagtggttattacttaggaggggcttttgatatctgg

SEQ ID NO: 3557 - DNA, 60 bp, synthetic construct
  misc_feature 1..60: note = Synthetic construct
  source 1..60: mol_type = other DNA
tgtgcgaaaaccacgacgttttattatgataatagtgacctttttgcttttgatatctgg

SEQ ID NO: 3558 - DNA, 51 bp, synthetic construct
  misc_feature 1..51: note = Synthetic construct
  source 1..51: mol_type = other DNA
tgtgcgagagaggcaggtggctggtcctctcacaactggttcgacccctgg

SEQ ID NO: 3559 - DNA, 39 bp, synthetic construct
  misc_feature 1..39: note = Synthetic construct
  source 1..39: mol_type = other DNA
tgtgcgagagaagggcattccgaaggttttgatatttgg

SEQ ID NO: 3560 - DNA, 69 bp, synthetic construct
  misc_feature 1..69: note = Synthetic construct
  source 1..69: mol_type = other DNA
tgtaccacaggactaggaagcgatgataatagtgattattttatgaacattgatggttttaatatctgg

SEQ ID NO: 3561 - DNA, 57 bp, synthetic construct
  misc_feature 1..57: note = Synthetic construct
  source 1..57: mol_type = other DNA
tgtgcgagagtttttaggactggagactattggaggggacttctgtgggactactgg

SEQ ID NO: 3562 - DNA, 87 bp, synthetic construct
  misc_feature 1..87: note = Synthetic construct
  source 1..87: mol_type = other DNA
tgcgcggctcatctgaggggggcgacagatggcggtttttggagtggccttgcgcgtttgaagtcctgggggtggctcgacccctgg

SEQ ID NO: 3563 - DNA, 57 bp, synthetic construct
  misc_feature 1..57: note = Synthetic construct
  source 1..57: mol_type = other DNA
tgtaccacagattttcggttcgatgacagtggttactacaactacttagataactgg

SEQ ID NO: 3564 - DNA, 57 bp, synthetic construct
  misc_feature 1..57: note = Synthetic construct
  source 1..57: mol_type = other DNA
tgtgcgaaagagggtggacgtggatatagttccttcgataattactttgactattgg

SEQ ID NO: 3565 - DNA, 36 bp, synthetic construct
  misc_feature 1..36: note = Synthetic construct
  source 1..36: mol_type = other DNA
tgtgcgagaaatagtgcccagccctttgactcctgg

SEQ ID NO: 3566 - DNA, 69 bp, synthetic construct
  misc_feature 1..69: note = Synthetic construct
  source 1..69: mol_type = other DNA
tgtgcgagagatatcgcccctcattactatgatagtagtgcttattcacccgatgcttttgatatctgg

SEQ ID NO: 3567 - DNA, 48 bp, synthetic construct
  misc_feature 1..48: note = Synthetic construct
  source 1..48: mol_type = other DNA
tgtgcgaaacggcaggggtatagtagctcgtccccgttggggtcctgg

SEQ ID NO: 3568 - DNA, 48 bp, synthetic construct
  misc_feature 1..48: note = Synthetic construct
  source 1..48: mol_type = other DNA
tgtgcgaaacgacaggggtatagtagctcgtccccgttggggtcctgg

SEQ ID NO: 3569 - DNA, 57 bp, synthetic construct
  misc_feature 1..57: note = Synthetic construct
  source 1..57: mol_type = other DNA
tgcgcgagagtcggctgtagtggtgatcattgctatggatattactttgactactgg

SEQ ID NO: 3570 - DNA, 39 bp, synthetic construct
  misc_feature 1..39: note = Synthetic construct
  source 1..39: mol_type = other DNA
tgtgcaaccctctctgcccctgttatctcccgtcactgg

SEQ ID NO: 3571 - DNA, 51 bp, synthetic construct
  misc_feature 1..51: note = Synthetic construct
  source 1..51: mol_type = other DNA
tgtgcgagagggcgcagtgactggttgactggaggaggttttgatatttgg

SEQ ID NO: 3572 - DNA, 42 bp, synthetic construct
  misc_feature 1..42: note = Synthetic construct
  source 1..42: mol_type = other DNA
tgtgcaagagaggactacggtggtaaaccccaggcctactgg

SEQ ID NO: 3573 - DNA, 39 bp, synthetic construct
  misc_feature 1..39: note = Synthetic construct
  source 1..39: mol_type = other DNA
tgtgcgagaggtttgtccgcagtggctggttcggggtgg

SEQ ID NO: 3574 - DNA, 54 bp, synthetic construct
  misc_feature 1..54: note = Synthetic construct
  source 1..54: mol_type = other DNA
tgtgcgcgagttcagcatgatagtagtggttattattctggccttgacttctgg

SEQ ID NO: 3575 - DNA, 60 bp, synthetic construct
  misc_feature 1..60: note = Synthetic construct
  source 1..60: mol_type = other DNA
tgtgcgaggcgatacaccggtgcctggtcctacttcacgtaccactacttggacgtctgg

SEQ ID NO: 3576 - DNA, 57 bp, synthetic construct
  misc_feature 1..57: note = Synthetic construct
  source 1..57: mol_type = other DNA
tgtgcgaaaccgcgggtgaactttggttcggggagaggagacgattttgatatctgg

SEQ ID NO: 3577 - DNA, 51 bp, synthetic construct
  misc_feature 1..51: note = Synthetic construct
  source 1..51: mol_type = other DNA
tgtgcgagaaattttggagtgattcttataggagatgcctttgatctctgg

SEQ ID NO: 3578 - DNA, 63 bp, synthetic construct
  misc_feature 1..63: note = Synthetic construct
  source 1..63: mol_type = other DNA
tgtgtcagaggcgattcagttcacttcgataggaatgcatattatgggggatttgatgtctgg

SEQ ID NO: 3579 - DNA, 54 bp, synthetic construct
  misc_feature 1..54: note = Synthetic construct
  source 1..54: mol_type = other DNA
tgtgcgagagatccccctagtgagtgggaggtaacgttctactttgactactgg

SEQ ID NO: 3580 - DNA, 60 bp, synthetic construct
  misc_feature 1..60: note = Synthetic construct
  source 1..60: mol_type = other DNA
tgtgcgagagacggtgcgtccatttttatcgaagtaattaatttctacatggacgtctgg

SEQ ID NO: 3581 - DNA, 51 bp, synthetic construct
  misc_feature 1..51: note = Synthetic construct
  source 1..51: mol_type = other DNA
tgtgcgcgccggttttgtagtggtggtagctgctactctcttgaatattgg

SEQ ID NO: 3582 - DNA, 51 bp, synthetic construct
  misc_feature 1..51: note = Synthetic construct
  source 1..51: mol_type = other DNA
tgtgtgaaggattcgggttcggggaggatcatttccctgcttgacttctgg

SEQ ID NO: 3583 - DNA, 48 bp, synthetic construct
  misc_feature 1..48: note = Synthetic construct
  source 1..48: mol_type = other DNA
tgtgcgagaggtcccggatacagctatgacatccagtttgactactgg

SEQ ID NO: 3584 - DNA, 48 bp, synthetic construct
  misc_feature 1..48: note = Synthetic construct
  source 1..48: mol_type = other DNA
tgtgcgagaagtcacggagatggctacaattcttactttgactactgg

SEQ ID NO: 3585 - DNA, 45 bp, synthetic construct
  misc_feature 1..45: note = Synthetic construct
  source 1..45: mol_type = other DNA
tgtgcgaaagactattatggttcggggagttattgcgactactgg

SEQ ID NO: 3586 - DNA, 72 bp, synthetic construct
  misc_feature 1..72: note = Synthetic construct
  source 1..72: mol_type = other DNA
tgtgcgagagccaacacctattactttacctcggggacttattataacaatgacgactaccttgactcctgg

SEQ ID NO: 3587 - DNA, 48 bp, synthetic construct
  misc_feature 1..48: note = Synthetic construct
  source 1..48: mol_type = other DNA
tgtggaagagattttgggagatggccgcccaggggacttgactactgg

SEQ ID NO: 3588 - DNA, 45 bp, synthetic construct
  misc_feature 1..45: note = Synthetic construct
  source 1..45: mol_type = other DNA
tgtgcgaaagacatgtttgatattagtggtctcaatgactactgg

SEQ ID NO: 3589 - DNA, 48 bp, synthetic construct
  misc_feature 1..48: note = Synthetic construct
  source 1..48: mol_type = other DNA
tgtgcgaaagatcgggatgactacggtgactactactttgactactgg

SEQ ID NO: 3590 - DNA, 51 bp, synthetic construct
  misc_feature 1..51: note = Synthetic construct
  source 1..51: mol_type = other DNA
tgtgcgagagcccaaacccattactatgatagtagagggtttggcgactgg

SEQ ID NO: 3591 - DNA, 48 bp, synthetic construct
  misc_feature 1..48: note = Synthetic construct
  source 1..48: mol_type = other DNA
tgtgcgagagatcggtttgtagaggctacgaccacggcggacttctgg

SEQ ID NO: 3592 - DNA, 66 bp, synthetic construct
  misc_feature 1..66: note = Synthetic construct
  source 1..66: mol_type = other DNA
tatgcgagagtggagaggacaccctcatccggggcactctactactactactacatggacgtctgg

SEQ ID NO: 3593 - DNA, 63 bp, synthetic construct
  misc_feature 1..63: note = Synthetic construct
  source 1..63: mol_type = other DNA
tgtgcgaaagagggtggatatagtggctacggttactactactactactacatggacgtctgg

SEQ ID NO: 3594 - DNA, 48 bp, synthetic construct
  misc_feature 1..48: note = Synthetic construct
  source 1..48: mol_type = other DNA
tgtgcgaaagatccgaactcgggcagcagtggccaccttgactactgg

SEQ ID NO: 3595 - DNA, 51 bp, synthetic construct
  misc_feature 1..51: note = Synthetic construct
  source 1..51: mol_type = other DNA
tgtgcgaaagatgtggttcggggagttgactactactacatggacgtctgg

SEQ ID NO: 3596 - DNA, 66 bp, synthetic construct
  misc_feature 1..66: note = Synthetic construct
  source 1..66: mol_type = other DNA
tgtgcgagagatcggagtagttactatgatagtagtggttattacctaaactggttcgacccctgg

SEQ ID NO: 3597 - DNA, 60 bp, synthetic construct
  misc_feature 1..60: note = Synthetic construct
  source 1..60: mol_type = other DNA
tgtgcgagagattactgtagtagtaccagctgccctttctactactacatggacgtctgg

SEQ ID NO: 3598 - DNA, 66 bp, synthetic construct
  misc_feature 1..66: note = Synthetic construct
  source 1..66: mol_type = other DNA
tgtgcgagagctcacggcgaaggatattgtactaatggtgtatgttcctcctactttgactactgg

SEQ ID NO: 3599 - DNA, 39 bp, synthetic construct
  misc_feature 1..39: note = Synthetic construct
  source 1..39: mol_type = other DNA
tgtgcgaaagacgccaatggtggctggtatgactactgg

SEQ ID NO: 3600 - DNA, 42 bp, synthetic construct
  misc_feature 1..42: note = Synthetic construct
  source 1..42: mol_type = other DNA
tgtgcgttctttccctcgggcagttatgcctttcacatttgg

SEQ ID NO: 3601 - DNA, 63 bp, synthetic construct
  misc_feature 1..63: note = Synthetic construct
  source 1..63: mol_type = other DNA
tgtgcaagggatcagtattactctgaaactactgcttattacttcaaatacttccaacactgg

SEQ ID NO: 3602 - DNA, 63 bp, synthetic construct
  misc_feature 1..63: note = Synthetic construct
  source 1..63: mol_type = other DNA
tgtgcgaaagtcggttatggtatcagttggtacttgggctactactactacatggacgactgg

SEQ ID NO: 3603 - DNA, 63 bp, synthetic construct
  misc_feature 1..63: note = Synthetic construct
  source 1..63: mol_type = other DNA
tgtgcgagagctttcgggaatttttttgattggtcctcccgggactattacatggacgtctgg

SEQ ID NO: 3604 - DNA, 45 bp, synthetic construct
  misc_feature 1..45: note = Synthetic construct
  source 1..45: mol_type = other DNA
tgtgcgcgagggggggcctacgaaatgacctggtttgacacctgg

SEQ ID NO: 3605 - DNA, 60 bp, synthetic construct
  misc_feature 1..60: note = Synthetic construct
  source 1..60: mol_type = other DNA
tgtgcgcgagatcatatggtgtctgcttcctcctacaactccttctacatggacgtctgg

SEQ ID NO: 3606 - DNA, 48 bp, synthetic construct
  misc_feature 1..48: note = Synthetic construct
  source 1..48: mol_type = other DNA
tgtgcgagcatgaccatggttcggacgaataactggttcgacctctgg

SEQ ID NO: 3607 - DNA, 54 bp, synthetic construct
  misc_feature 1..54: note = Synthetic construct
  source 1..54: mol_type = other DNA
tgtgcgacagataggcattcctatcattcggggagttttgttcttgacttctgg

SEQ ID NO: 3608 - DNA, 48 bp, synthetic construct
  misc_feature 1..48: note = Synthetic construct
  source 1..48: mol_type = other DNA
tgcgcgaaaaagtttggccgcggactgtctgatgtttttgatatgtgg

SEQ ID NO: 3609 - DNA, 33 bp, synthetic construct
  misc_feature 1..33: note = Synthetic construct
  source 1..33: mol_type = other DNA
tgtgcgctatattggaattatgtcctcgagtgg

SEQ ID NO: 3610 - DNA, 51 bp, synthetic construct
  misc_feature 1..51: note = Synthetic construct
  source 1..51: mol_type = other DNA
tgtactagacatctggatttcaatagtgacccgtcggggggggactactgg

SEQ ID NO: 3611 - DNA, 51 bp, synthetic construct
  misc_feature 1..51: note = Synthetic construct
  source 1..51: mol_type = other DNA
tgtgcaaaatccccctcccctgaggtgggaactacaccctttgactactgg

SEQ ID NO: 3612 - DNA, 51 bp, synthetic construct
  misc_feature 1..51: note = Synthetic construct
  source 1..51: mol_type = other DNA
tgtgcaaaggacctagcagcagctggcacttatgatgcttttgaaaaatgg

SEQ ID NO: 3613 - DNA, 48 bp, synthetic construct
  misc_feature 1..48: note = Synthetic construct
  source 1..48: mol_type = other DNA
tgtgtaaaagatctcgcgagcggtatggttcagggttttgatatctgg

SEQ ID NO: 3614 - DNA, 60 bp, synthetic construct
  misc_feature 1..60: note = Synthetic construct
  source 1..60: mol_type = other DNA
tgtgcaaaagattcccacccttcttatggttcggggagttgggatgcttttgatatctgg

SEQ ID NO: 3615 - DNA, 57 bp, synthetic construct
  misc_feature 1..57: note = Synthetic construct
  source 1..57: mol_type = other DNA
tgtgcaagagatataaacccctatagcagtggctgggtgtcctactttgactactgg

SEQ ID NO: 3616 - DNA, 63 bp, synthetic construct
  misc_feature 1..63: note = Synthetic construct
  source 1..63: mol_type = other DNA
tgtgcaaaggataggggattacgtttgggggagttatcgcggggtcactactttgacttgtgg

SEQ ID NO: 3617 - DNA, 45 bp, synthetic construct
  misc_feature 1..45: note = Synthetic construct
  source 1..45: mol_type = other DNA
tgtgcaaaagacagtagtggatataatgatgcttttgagatctgg

SEQ ID NO: 3618 - DNA, 45 bp, synthetic construct
  misc_feature 1..45: note = Synthetic construct
  source 1..45: mol_type = other DNA
tgtgtgaaagataaaacccgtggccatcagtacttccaacactgg

SEQ ID NO: 3619 - DNA, 42 bp, synthetic construct
  misc_feature 1..42: note = Synthetic construct
  source 1..42: mol_type = other DNA
tgtgcaaaagatgagggatttttgactggtttttctcattgg

SEQ ID NO: 3620 - DNA, 48 bp, synthetic construct
  misc_feature 1..48: note = Synthetic construct
  source 1..48: mol_type = other DNA
tgtgcaacaccctcgcgtagggggtggttattatgggttgactactgg

SEQ ID NO: 3621 - DNA, 42 bp, synthetic construct
  misc_feature 1..42: note = Synthetic construct
  source 1..42: mol_type = other DNA
tgtgcaacagaaggatatagtggctacgactttgactactgg

SEQ ID NO: 3622 - DNA, 30 bp, synthetic construct
  misc_feature 1..30: note = Synthetic construct
  source 1..30: mol_type = other DNA
tgtgcaacagatacccctattcgggagtgg

SEQ ID NO: 3623 - DNA, 45 bp, synthetic construct
  misc_feature 1..45: note = Synthetic construct
  source 1..45: mol_type = other DNA
tgtgcaacagatcagggtagtggttattactactttgactactgg

SEQ ID NO: 3624 - DNA, 42 bp, synthetic construct
  misc_feature 1..42: note = Synthetic construct
  source 1..42: mol_type = other DNA
tgtgcaacagccaacattggggctattactatagcctactgg

SEQ ID NO: 3625 - DNA, 39 bp, synthetic construct
  misc_feature 1..39: note = Synthetic construct
  source 1..39: mol_type = other DNA
tgtgcaacagccgctagtagtggttattttttctactgg

SEQ ID NO: 3626 - DNA, 66 bp, synthetic construct
  misc_feature 1..66: note = Synthetic construct
  source 1..66: mol_type = other DNA
tgtgcaacagcgggtggttacgatattttgactggttattatagccccggtgcttttgatatctgg

SEQ ID NO: 3627 - DNA, 54 bp, synthetic construct
  misc_feature 1..54: note = Synthetic construct
  source 1..54: mol_type = other DNA
tgtgcaactgtaactactgggaggggctactactactactacatggacgtctgg

SEQ ID NO: 3628 - DNA, 45 bp, synthetic construct
  misc_feature 1..45: note = Synthetic construct
  source 1..45: mol_type = other DNA
tgtgcaaggaggcattacgatattttgacttcggtcgacccctgg

SEQ ID NO: 3629 - DNA, 42 bp, synthetic construct
  misc_feature 1..42: note = Synthetic construct
  source 1..42: mol_type = other DNA
tgtgcaatggttatggctacaatgaggagggttgactactgg

SEQ ID NO: 3630 - DNA, 42 bp, synthetic construct
  misc_feature 1..42: note = Synthetic construct
  source 1..42: mol_type = other DNA
tgtgcgacgcacttcgacggctacaatctacccgactactgg

SEQ ID NO: 3631 - DNA, 39 bp, synthetic construct
  misc_feature 1..39: note = Synthetic construct
  source 1..39: mol_type = other DNA
tgtgtgaccctctctgcccctgttacctcacgccagtgg

SEQ ID NO: 3632 - DNA, 60 bp, synthetic construct
  misc_feature 1..60: note = Synthetic construct
  source 1..60: mol_type = other DNA
tgtgcgagagcctcaggtggatatagtggctacgaccaatggtactactttgactactgg

SEQ ID NO: 3633 - DNA, 42 bp, synthetic construct
  misc_feature 1..42: note = Synthetic construct
  source 1..42: mol_type = other DNA
tgtctgttactggaaggtttgacagcaacttctactgactgg

SEQ ID NO: 3634 - DNA, 54 bp, synthetic construct
  misc_feature 1..54: note = Synthetic construct
  source 1..54: mol_type = other DNA
tgtgcgagatgcgaaattttgaccggttattatagttgccacttcgactcctgg

SEQ ID NO: 3635 - DNA, 57 bp, synthetic construct
  misc_feature 1..57: note = Synthetic construct
  source 1..57: mol_type = other DNA
tgtgcgagattgaatggtgactacgaagaggggaactactactacatggacgtctgg

SEQ ID NO: 3636 - DNA, 42 bp, synthetic construct
  misc_feature 1..42: note = Synthetic construct
  source 1..42: mol_type = other DNA
tgtgcgagtggggttgatacagcctatgcttttgatatctgg

SEQ ID NO: 3637 - DNA, 60 bp, synthetic construct
  misc_feature 1..60: note = Synthetic construct
  source 1..60: mol_type = other DNA
tgtgtgagagaaagggcccttcggcctaatatagcagctcgtggaccctttgactactgg

SEQ ID NO: 3638 - DNA, 54 bp, synthetic construct
  misc_feature 1..54: note = Synthetic construct
  source 1..54: mol_type = other DNA
tgtgcgagagataatcagttgaggagcagcacactatggggctttgactactgg

SEQ ID NO: 3639 - DNA, 42 bp, synthetic construct
  misc_feature 1..42: note = Synthetic construct
  source 1..42: mol_type = other DNA
tgtgcggcggtcagggggagcttctttcaccttcaccactgg

SEQ ID NO: 3640 - DNA, 57 bp, synthetic construct
  misc_feature 1..57: note = Synthetic construct
  source 1..57: mol_type = other DNA
tgtgtgagagatctctggtcgatctacggtgacttcatcaagggatttgtcgactgg

SEQ ID NO: 3641 - DNA, 36 bp, synthetic construct
  misc_feature 1..36: note = Synthetic construct
  source 1..36: mol_type = other DNA
tgtgcgagagcatacaattattcttgtggattctgg

SEQ ID NO: 3642 - DNA, 54 bp, synthetic construct
  misc_feature 1..54: note = Synthetic construct
  source 1..54: mol_type = other DNA
tgtgtgataggccgagcagcaggtggaaggggcactgacgcttttgcgatctgg

SEQ ID NO: 3643 - DNA, 51 bp, synthetic construct
  misc_feature 1..51: note = Synthetic construct
  source 1..51: mol_type = other DNA
tgtgcaacagatctactatggttcggggagcgtgatgcttttgatatctgg

SEQ ID NO: 3644 - DNA, 36 bp, synthetic construct
  misc_feature 1..36: note = Synthetic construct
  source 1..36: mol_type = other DNA
tgtgcaacttgggagcagggctggtcggtctactgg

SEQ ID NO: 3645 - DNA, 63 bp, synthetic construct
  misc_feature 1..63: note = Synthetic construct
  source 1..63: mol_type = other DNA
tgtacgagagttcgacttcgtatagatgcaataggggcccgcagcaactggttcgacccctgg

SEQ ID NO: 3646 - DNA, 45 bp, synthetic construct
  misc_feature 1..45: note = Synthetic construct
  source 1..45: mol_type = other DNA
tgtgcggcagtctcccaccagtctggtggtgcttttgatatctgg

SEQ ID NO: 3647 - DNA, 42 bp, synthetic construct
  misc_feature 1..42: note = Synthetic construct
  source 1..42: mol_type = other DNA
tgtgcgagagaccatgggagcgactggtacttcgatctctgg

SEQ ID NO: 3648 - DNA, 48 bp, synthetic construct
  misc_feature 1..48: note = Synthetic construct
  source 1..48: mol_type = other DNA
tgtgcgagagaaataactgagttttactatggttcgggggactactgg

SEQ ID NO: 3649 - DNA, 60 bp, synthetic construct
  misc_feature 1..60: note = Synthetic construct
  source 1..60: mol_type = other DNA
tgtgcgagagatcggctctgtagtggtggtagctgctactccgggtggttcgacccctgg

SEQ ID NO: 3650 - DNA, 54 bp, synthetic construct
  misc_feature 1..54: note = Synthetic construct
  source 1..54: mol_type = other DNA
tgtgcgagagatccaaccccttactatgaggggggttggtacttcgatctctgg

SEQ ID NO: 3651 - DNA, 48 bp, synthetic construct
  misc_feature 1..48: note = Synthetic construct
  source 1..48: mol_type = other DNA
tgtgcgagaaacctagattactatggtttgggggagttcgacccctgg

SEQ ID NO: 3652 - DNA, 42 bp, synthetic construct
  misc_feature 1..42: note = Synthetic construct
  source 1..42: mol_type = other DNA
tgtgcaacactggcggttcgaagagtcccacgcccgtactgg

SEQ ID NO: 3653 - DNA, 42 bp, synthetic construct
  misc_feature 1..42: note = Synthetic construct
  source 1..42: mol_type = other DNA
tgtgtgcgagcgcaccgggggagcccctactttgactcctgg

SEQ ID NO: 3654 - DNA, 51 bp, synthetic construct
  misc_feature 1..51: note = Synthetic construct
  source 1..51: mol_type = other DNA
tgtgctagagcctctgggggatctacagtccaccgctactatgactactgg

SEQ ID NO: 3655 - DNA, 51 bp, synthetic construct
  misc_feature 1..51: note = Synthetic construct
  source 1..51: mol_type = other DNA
tgtgttaaagatggagacagcaacaccgcatacttccactttgacacttgg

SEQ ID NO: 3656 - DNA, 63 bp, synthetic construct
  misc_feature 1..63: note = Synthetic construct
  source 1..63: mol_type = other DNA
tgtactagagcctcttactgtattaatggaagatgcacgtcacctggcccctttgacttctgg

SEQ ID NO: 3657 - DNA, 57 bp, synthetic construct
  misc_feature 1..57: note = Synthetic construct
  source 1..57: mol_type = other DNA
tgtgccagagggggcttccatgacgaataccgggccctttcgccctttgacttctgg

SEQ ID NO: 3658 - DNA, 66 bp, synthetic construct
  misc_feature 1..66: note = Synthetic construct
  source 1..66: mol_type = other DNA
tgtgcgagagaccgccttcatgacccatccgcggtgcgcttttttgactggtcgtttgacaagtgg

SEQ ID NO: 3659 - DNA, 57 bp, synthetic construct
  misc_feature 1..57: note = Synthetic construct
  source 1..57: mol_type = other DNA
tgtgcgagaatgtcttattacgatggaagtggttactacttcttctttgaccactgg

SEQ ID NO: 3660 - DNA, 54 bp, synthetic construct
  misc_feature 1..54: note = Synthetic construct
  source 1..54: mol_type = other DNA
tgtgcgacagcgggggcccacagtaatggtttctattacggctttgagtcctgg

SEQ ID NO: 3661 - DNA, 54 bp, synthetic construct
  misc_feature 1..54: note = Synthetic construct
  source 1..54: mol_type = other DNA
tgtgcgaggttccccataacacctactgctaactattactacatggacgtctgg

SEQ ID NO: 3662 - DNA, 42 bp, synthetic construct
  misc_feature 1..42: note = Synthetic construct
  source 1..42: mol_type = other DNA
tgtgtgaaatatggtgcacaggaatggttaggggagtcttgg

SEQ ID NO: 3663 - DNA, 60 bp, synthetic construct
  misc_feature 1..60: note = Synthetic construct
  source 1..60: mol_type = other DNA
tgtgcgagagggttcgacgcttatgattttttgcctggctctccctactttgactactgg

SEQ ID NO: 3664 - DNA, 54 bp, synthetic construct
  misc_feature 1..54: note = Synthetic construct
  source 1..54: mol_type = other DNA
tgtgcgagactagtggagaggttctccccccacactttctactttcactactgg

SEQ ID NO: 3665 - DNA, 69 bp, synthetic construct
  misc_feature 1..69: note = Synthetic construct
  source 1..69: mol_type = other DNA
tgtgcaagagatcgatctccccttattaagatttttggagtgcttatgggctcctacatggacgtctgg

SEQ ID NO: 3666 - DNA, 42 bp, synthetic construct; identical to SEQ ID NO: 1770
  misc_feature 1..42: note = Synthetic construct
  source 1..42: mol_type = other DNA

SEQ ID NO: 3667 - DNA, 33 bp, synthetic construct
  misc_feature 1..33: note = Synthetic construct
  source 1..33: mol_type = other DNA
tgtgcgagagtcctatttggggggcccctgtgg

SEQ ID NO: 3668 - DNA, 51 bp, synthetic construct
  misc_feature 1..51: note = Synthetic construct
  source 1..51: mol_type = other DNA
tgtgcgcgcggtctcagtcccaactggtacttcgatgcttttgacatatgg

SEQ ID NO: 3669 - DNA, 36 bp, synthetic construct
  misc_feature 1..36: note = Synthetic construct
  source 1..36: mol_type = other DNA
tgtgcgaaagaatttagaggagcttttgatatctgg

SEQ ID NO: 3670 - DNA, 54 bp, synthetic construct
  misc_feature 1..54: note = Synthetic construct
  source 1..54: mol_type = other DNA
tgtgcgaggagacacagtggcgacgattcgcccagctacttctttgactactgg

SEQ ID NO: 3671 - DNA, 51 bp, synthetic construct
  misc_feature 1..51: note = Synthetic construct
  source 1..51: mol_type = other DNA
tgcacgagaggccgatacccccgcatgcttcgcaggcactttgacttctgg

SEQ ID NO: 3672 - DNA, 54 bp, synthetic construct
  misc_feature 1..54: note = Synthetic construct
  source 1..54: mol_type = other DNA
tgtgcgacccgaagacggatgttttcgaccaatgtcgattcttatgatatctgg

SEQ ID NO: 3673 - DNA, 51 bp, synthetic construct
  misc_feature 1..51: note = Synthetic construct
  source 1..51: mol_type = other DNA
tgtgcggcagtccctgggggcctcttaattcgcgaaacgttcgagtcgtgg

SEQ ID NO: 3674 - DNA, 45 bp, synthetic construct
  misc_feature 1..45: note = Synthetic construct
  source 1..45: mol_type = other DNA
tgtacaacagcccggggccgctggacctaccactttgcgtcctgg

SEQ ID NO: 3675 - DNA, 57 bp, synthetic construct
  misc_feature 1..57: note = Synthetic construct
  source 1..57: mol_type = other DNA
tgtgcaagagcggcgatttttggagtggttttttgggaaaactatttcgacccctgg

SEQ ID NO: 3676 - DNA, 33 bp, synthetic construct
  misc_feature 1..33: note = Synthetic construct
  source 1..33: mol_type = other DNA
tgtgcgagatatgagtatgatcttgactactgg

SEQ ID NO: 3677 - DNA, 69 bp, synthetic construct
  misc_feature 1..69: note = Synthetic construct
  source 1..69: mol_type = other DNA
tgtgcaacagagggggtcggaaggactaataaagcaggtgttggttgggatgatgcttttgatatctgg

SEQ ID NO: 3678 - DNA, 66 bp, synthetic construct
  misc_feature 1..66: note = Synthetic construct
  source 1..66: mol_type = other DNA
tgtgcgaaatctaaaacccatactttttatcctggttcgggaggtcccacttacatcgacgactgg

SEQ ID NO: 3679 - DNA, 54 bp, synthetic construct
  misc_feature 1..54: note = Synthetic construct
  source 1..54: mol_type = other DNA
tgcgcgagagtgatggaaacagccatggcccccgactactacatggacgtctgg

SEQ ID NO: 3680 - DNA, 57 bp, synthetic construct
  misc_feature 1..57: note = Synthetic construct
  source 1..57: mol_type = other DNA
tgtgcgagcgcgaactggactgcggtgatttcaacaaccgataccctccatgtctgg

SEQ ID NO: 3681 - DNA, 48 bp, synthetic construct
  misc_feature 1..48: note = Synthetic construct
  source 1..48: mol_type = other DNA
tgtgcgaaggtgctgctgggagctcttaccgatgctttcgatatctgg

SEQ ID NO: 3682 - DNA, 54 bp, synthetic construct; identical to SEQ ID NO: 1773
  misc_feature 1..54: note = Synthetic construct
  source 1..54: mol_type = other DNA

SEQ ID NO: 3683 - DNA, 72 bp, synthetic construct
  misc_feature 1..72: note = Synthetic construct
  source 1..72: mol_type = other DNA
tgtgcaacctcccctaagtttgatgataacgcctgggggacttttcgtgatacggccacacctgactactgg

SEQ ID NO: 3684 - DNA, 54 bp, synthetic construct
  misc_feature 1..54: note = Synthetic construct
  source 1..54: mol_type = other DNA
tgtgccagaggcgataggtcgataatagtaggtcaattttacatggacgtctgg

SEQ ID NO: 3685 - DNA, 51 bp, synthetic construct
  misc_feature 1..51: note = Synthetic construct
  source 1..51: mol_type = other DNA
tgtgcgcgatgtaaggccgaatatacgactggttgccccggggactattgg

SEQ ID NO: 3686 - DNA, 45 bp, synthetic construct
  misc_feature 1..45: note = Synthetic construct
  source 1..45: mol_type = other DNA
tgtgcgcgacggttttattcttatggttttgcctttgatatctgg

SEQ ID NO: 3687 - DNA, 63 bp, synthetic construct
  misc_feature 1..63: note = Synthetic construct
  source 1..63: mol_type = other DNA
tgtgcgagaggttggggtatatcgattggtggagcgacaaccaccaagtggctccacccctgg

SEQ ID NO: 3688 - DNA, 66 bp, synthetic construct
  misc_feature 1..66: note = Synthetic construct
  source 1..66: mol_type = other DNA
tgtgcgagagagggggcaggctattactatgatagcagtggcctgggatatggctttgatatctgg

SEQ ID NO: 3689 - DNA, 42 bp, synthetic construct
  misc_feature 1..42: note = Synthetic construct
  source 1..42: mol_type = other DNA
tgtgcgagagctgatagcaccgactggcaaatggactactgg

SEQ ID NO: 3690 - DNA, 39 bp, synthetic construct
  misc_feature 1..39: note = Synthetic construct
  source 1..39: mol_type = other DNA
tgtgcgagacgatatggcttcactcccctcgacttctgg

SEQ ID NO: 3691 - DNA, 63 bp, synthetic construct
  misc_feature 1..63: note = Synthetic construct
  source 1..63: mol_type = other DNA
tgtgcgagagataatcggccttattatgatatgagtgggtattcacctgaccttgactactgg

SEQ ID NO: 3692 - DNA, 51 bp, synthetic construct
  misc_feature 1..51: note = Synthetic construct
  source 1..51: mol_type = other DNA
tgtgcgagagagacgtggggattccttggagggggctactttgactattgg

SEQ ID NO: 3693 - DNA, 48 bp, synthetic construct
  misc_feature 1..48: note = Synthetic construct
  source 1..48: mol_type = other DNA
tgtgcgaaatatcgcccaggacctaagaatgatgctttgcatgtctgg

SEQ ID NO: 3694 - DNA, 42 bp, synthetic construct
  misc_feature 1..42: note = Synthetic construct
  source 1..42: mol_type = other DNA
tgtgcgcgaatttattatagtgggacgtaccaagactactgg

SEQ ID NO: 3695 - DNA, 66 bp, synthetic construct
  misc_feature 1..66: note = Synthetic construct
  source 1..66: mol_type = other DNA
tgtactcgagataaaggaatgtatgactggaactccgggacctacctctactacatggacgcctgg

SEQ ID NO: 3696 - DNA, 57 bp, synthetic construct; identical to SEQ ID NO: 1769
  misc_feature 1..57: note = Synthetic construct
  source 1..57: mol_type = other DNA

SEQ ID NO: 3697 - DNA, 36 bp, synthetic construct
  misc_feature 1..36: note = Synthetic construct
  source 1..36: mol_type = other DNA
tgcaccgtccacattggcaccagcgctaacttctgg

SEQ ID NO: 3698 - DNA, 66 bp, synthetic construct
  misc_feature 1..66: note = Synthetic construct
  source 1..66: mol_type = other DNA
tgtactagagatcgaggaacgtatgactggaactacgggacctacttctactacatggaagtctgg

SEQ ID NO: 3699 - DNA, 54 bp, synthetic construct
  misc_feature 1..54: note = Synthetic construct
  source 1..54: mol_type = other DNA
tgtgcgagagggggacgcacctttggttatacgtgggagttctttgacaactgg

SEQ ID NO: 3700 - DNA, 54 bp, synthetic construct
  misc_feature 1..54: note = Synthetic construct
  source 1..54: mol_type = other DNA
tgtgcgagagagagaagtccgagagtcgactactaccactacatggacgtctgg

SEQ ID NO: 3701 - DNA, 42 bp, synthetic construct
  misc_feature 1..42: note = Synthetic construct
  source 1..42: mol_type = other DNA
tgtgcacacagtccaacatattccaacatctttgacttctgg

SEQ ID NO: 3702 - DNA, 54 bp, synthetic construct
  misc_feature 1..54: note = Synthetic construct
  source 1..54: mol_type = other DNA
tgtgtaagagcatattgtagtagtagcagctgcccaggcggttttgacttctgg

SEQ ID NO: 3703 - DNA, 42 bp, synthetic construct
  misc_feature 1..42: note = Synthetic construct
  source 1..42: mol_type = other DNA
tgtgcgaagggccgtgcaaattggcgatactttgacctctgg

SEQ ID NO: 3704 - DNA, 51 bp, synthetic construct
  misc_feature 1..51: note = Synthetic construct
  source 1..51: mol_type = other DNA
tgtgcgagaattagagtcggggaattatttttcggcacctttgacttctgg

SEQ ID NO: 3705 - DNA, 63 bp, synthetic construct
  misc_feature 1..63: note = Synthetic construct
  source 1..63: mol_type = other DNA
tgtgcgagaggacgttttcagagagtgggaggcgtctacacctacttctacatggacgtctgg

SEQ ID NO: 3706 - DNA, 51 bp, synthetic construct
  misc_feature 1..51: note = Synthetic construct
  source 1..51: mol_type = other DNA
tgtgtgaactccttcaaatacaggagcaacccgggggacttcggctcctgg

SEQ ID NO: 3707 - DNA, 63 bp, synthetic construct
  misc_feature 1..63: note = Synthetic construct
  source 1..63: mol_type = other DNA
tgtgcgagaggttggggtattacgatttctggagcgtctaccagcaagtggctccacccctgg

SEQ ID NO: 3708 - DNA, 78 bp, synthetic construct
  misc_feature 1..78: note = Synthetic construct
  source 1..78: mol_type = other DNA
tgtgcgagatttggctctccaactctccttattgactacggtgactacgaaaaggtgatcggtgctttggatgtctgg

SEQ ID NO: 3709 - DNA, 69 bp, synthetic construct
  misc_feature 1..69: note = Synthetic construct
  source 1..69: mol_type = other DNA
tgtgcgagaggtcacagaatatattatgatattagaagttattacggagagtcctggctcgacccctgg

SEQ ID NO: 3710 - DNA, 42 bp, synthetic construct
  misc_feature 1..42: note = Synthetic construct
  source 1..42: mol_type = other DNA
tgtgcacggatgctggcccgacagaattacttcgacccctgg

SEQ ID NO: 3711 - DNA, 54 bp, synthetic construct
  misc_feature 1..54: note = Synthetic construct
  source 1..54: mol_type = other DNA
tgtgcacggattctggaccctcattactatggttcgggggctattgactactgg

SEQ ID NO: 3712 - DNA, 57 bp, synthetic construct
  misc_feature 1..57: note = Synthetic construct
  source 1..57: mol_type = other DNA
tgctcgacagatgcttccaatgattacacctgggggagttatcgcctagaccactgg

SEQ ID NO: 3713 - DNA, 63 bp, synthetic construct
  misc_feature 1..63: note = Synthetic construct
  source 1..63: mol_type = other DNA
tgtgcgagagatggtctttattgtagtaggagtggctgtttcgcggactggctcgacctctgg

SEQ ID NO: 3714 - DNA, 42 bp, synthetic construct
  misc_feature 1..42: note = Synthetic construct
  source 1..42: mol_type = other DNA
tgtgtgagactgactgcggtgactcactactttgactactgg

SEQ ID NO: 3715 - DNA, 51 bp, synthetic construct
  misc_feature 1..51: note = Synthetic construct
  source 1..51: mol_type = other DNA
tgtgcgaggccccggaggagtggctacaattatgttggttttgatgtctgg

SEQ ID NO: 3716 - DNA, 48 bp, synthetic construct
  misc_feature 1..48: note = Synthetic construct
  source 1..48: mol_type = other DNA
tgtgcggtggccgcttacccggggagaggtaggcgtctcgacccctgg

SEQ ID NO: 3717 - DNA, 33 bp, synthetic construct
  misc_feature 1..33: note = Synthetic construct
  source 1..33: mol_type = other DNA
tgtgccagaggagttcgatattacgccccctgg

SEQ ID NO: 3718 - DNA, 45 bp, synthetic construct
  misc_feature 1..45: note = Synthetic construct
  source 1..45: mol_type = other DNA
tgtactagtccctcggggagttattaccccctcccctactactgg

SEQ ID NO: 3719 - DNA, 75 bp, synthetic construct
  misc_feature 1..75: note = Synthetic construct
  source 1..75: mol_type = other DNA
tgtgtacgggtaaaatattacgatgttgtgactggccatcctacggcctaccattcctactacatggacgtctgg

SEQ ID NO: 3720 - DNA, 51 bp, synthetic construct
  misc_feature 1..51: note = Synthetic construct
  source 1..51: mol_type = other DNA
tgtgcacgggcggcgtgtagtggttattactactactacatggacgtctgg

SEQ ID NO: 3721 - DNA, 57 bp, synthetic construct
  misc_feature 1..57: note = Synthetic construct
  source 1..57: mol_type = other DNA
tgtgcacggatcccacccaacacacagctatgggccaattactactttgactactgg

SEQ ID NO: 3722 - DNA, 48 bp, synthetic construct
  misc_feature 1..48: note = Synthetic construct
  source 1..48: mol_type = other DNA
tgtgcacggtcatttctgcctacatccagttattcttttgacttctgg

SEQ ID NO: 3723 - DNA, 72 bp, synthetic construct
  misc_feature 1..72: note = Synthetic construct
  source 1..72: mol_type = other DNA
tgcgcacggacactggttactaatgtggcagcagctgggaattactactaccactactacatggacgtctgg

SEQ ID NO: 3724 - DNA, 51 bp, synthetic construct
  misc_feature 1..51: note = Synthetic construct
  source 1..51: mol_type = other DNA
tgtgcacggataaggtactatggttcggggagttgttactttgactactgg

SEQ ID NO: 3725 - DNA, 39 bp, synthetic construct
  misc_feature 1..39: note = Synthetic construct
  source 1..39: mol_type = other DNA
tgtacacggcctgagaggaacgggcagatcgactactgg

SEQ ID NO: 3726 - DNA, 42 bp, synthetic construct
  misc_feature 1..42: note = Synthetic construct
  source 1..42: mol_type = other DNA
tgtgcacggaattcgaggcgggagagctttttcgacccctgg

SEQ ID NO: 3727 - DNA, 60 bp, synthetic construct
  misc_feature 1..60: note = Synthetic construct
  source 1..60: mol_type = other DNA
tgtgttagagaggccccttcttactatgatgccagtggttatttctactttgactactgg

SEQ ID NO: 3728 - DNA, 51 bp, synthetic construct
  misc_feature 1..51: note = Synthetic construct
  source 1..51: mol_type = other DNA
tgtgcacgggaggattttgatagtggaggttatcatgcatttgatatctgg

SEQ ID NO: 3729 - DNA, 51 bp, synthetic construct
  misc_feature 1..51: note = Synthetic construct
  source 1..51: mol_type = other DNA
tgtgcgaaggatcgtgacatggccacactttggggacacttccaacactgg

SEQ ID NO: 3730 - DNA, 57 bp, synthetic construct
  misc_feature 1..57: note = Synthetic construct
  source 1..57: mol_type = other DNA
tgtgcacggatgcgggtagtcgggtccggttcggggactcgttactttgactactgg

SEQ ID NO: 3731 - DNA, 39 bp, synthetic construct
  misc_feature 1..39: note = Synthetic construct
  source 1..39: mol_type = other DNA
tgtgcacaatcctacgtttcggggagtatcaaatcctgg

SEQ ID NO: 3732 - DNA, 63 bp, synthetic construct
  misc_feature 1..63: note = Synthetic construct
  source 1..63: mol_type = other DNA
tgtgcacacagaattgcgagtcgtaatggcttgaacctctatattgatgcttttgatttttgg

SEQ ID NO: 3733 - DNA, 54 bp, synthetic construct
  misc_feature 1..54: note = Synthetic construct
  source 1..54: mol_type = other DNA
tgcgcacacagtcgctattactatactttgggttcctggtactttgactactgg

SEQ ID NO: 3734 - DNA, 33 bp, synthetic construct
  misc_feature 1..33: note = Synthetic construct
  source 1..33: mol_type = other DNA
tgtgcacacaatggcctcccctttgactgctgg

SEQ ID NO: 3735 - DNA, 60 bp, synthetic construct
  misc_feature 1..60: note = Synthetic construct
  source 1..60: mol_type = other DNA
tgtgcacaccgaggacgatattgtagtggtaccggctgtgggtactactttgactactgg

SEQ ID NO: 3736 - DNA, 51 bp, synthetic construct
  misc_feature 1..51: note = Synthetic construct
  source 1..51: mol_type = other DNA
tgtgcattcagcccgcgaggtgtttattatgaatatttctttgaccactgg

SEQ ID NO: 3737 - DNA, 42 bp, synthetic construct
  misc_feature 1..42: note = Synthetic construct
  source 1..42: mol_type = other DNA
tgtgtgtacagtatatatgggtcggggatttttgggtactgg

SEQ ID NO: 3738 - DNA, 63 bp, synthetic construct
  misc_feature 1..63: note = Synthetic construct
  source 1..63: mol_type = other DNA
tgtgcacacaacgccaaccgtctgtatttctatgatagtggtcccacattctttgactactgg

SEQ ID NO: 3739 - DNA, 60 bp, synthetic construct
  misc_feature 1..60: note = Synthetic construct
  source 1..60: mol_type = other DNA
tgtacaaaattcgcaacatattactatgatactcctggtcatgaacaccttgactcctgg

SEQ ID NO: 3740 - DNA, 60 bp, synthetic construct
  misc_feature 1..60: note = Synthetic construct
  source 1..60: mol_type = other DNA
tgtgcgaggacccttataattggaagtacttatgaacctgaatattacatggacgtctgg

SEQ ID NO: 3741 - DNA, 36 bp, synthetic construct
  misc_feature 1..36: note = Synthetic construct
  source 1..36: mol_type = other DNA
tgtgcgctcttccctagtggcaactacgactactgg

SEQ ID NO: 3742 - DNA, 81 bp, synthetic construct
  misc_feature 1..81: note = Synthetic construct
  source 1..81: mol_type = other DNA
tgtgcaagagatctctgggtagatattatgagtacgtttgggggacgtatcgccatgacggatggggcttttgatatctgg

SEQ ID NO: 3743 - DNA, 57 bp, synthetic construct
  misc_feature 1..57: note = Synthetic construct
  source 1..57: mol_type = other DNA
tgcgccagcggatattgtagcggtggaagatgctacggggaattcctccagcactgg

SEQ ID NO: 3744 - DNA, 66 bp, synthetic construct
  misc_feature 1..66: note = Synthetic construct
  source 1..66: mol_type = other DNA
tgtgcgcgagataaaagggaggtattggttttcagagcaggcactggttcgggattcgacccctgg

SEQ ID NO: 3745 - DNA, 60 bp, synthetic construct
  misc_feature 1..60: note = Synthetic construct
  source 1..60: mol_type = other DNA
tgttcgagagggaccaaggggggggtcagcccacactcctactactacgtggacgtctgg

SEQ ID NO: 3746 - DNA, 42 bp, synthetic construct
  misc_feature 1..42: note = Synthetic construct
  source 1..42: mol_type = other DNA
tgtgcgagagccctgtatgacagcaacccgtttgactactgg

SEQ ID NO: 3747 - DNA, 48 bp, synthetic construct
  misc_feature 1..48: note = Synthetic construct
  source 1..48: mol_type = other DNA
tgtgcgagagcccgccattattatgggtcggggagttttgactcctgg

SEQ ID NO: 3748 - DNA, 69 bp, synthetic construct
  misc_feature 1..69: note = Synthetic construct
  source 1..69: mol_type = other DNA
tgtgcgagttcgttaattcggccatattgtgatggtggtgcctgctactcgaattgggtcgacccctgg

SEQ ID NO: 3749 - DNA, 42 bp, synthetic construct
  misc_feature 1..42: note = Synthetic construct
  source 1..42: mol_type = other DNA
tgtgcgaggtcgagagatggctacaactccctttatatctgg

SEQ ID NO: 3750 - DNA, 60 bp, synthetic construct
  misc_feature 1..60: note = Synthetic construct
  source 1..60: mol_type = other DNA
tgtgcgagagagtcgaacgagcttcggagtgcttatcacccctatcactttgactactgg

SEQ ID NO: 3751 - DNA, 57 bp, synthetic construct
  misc_feature 1..57: note = Synthetic construct
  source 1..57: mol_type = other DNA
tgtgcgagagattcccacctggttcggggagtcgagtctcccgaatctgactactgg

SEQ ID NO: 3752 - DNA, 45 bp, synthetic construct
  misc_feature 1..45: note = Synthetic construct
  source 1..45: mol_type = other DNA
tgtgcgagacagatgggagattattactactatatggacgtctgg

SEQ ID NO: 3753 - DNA, 42 bp, synthetic construct
  misc_feature 1..42: note = Synthetic construct
  source 1..42: mol_type = other DNA
tgtgcgagatcaatctggcaaccggaatactttgactactgg

SEQ ID NO: 3754 - DNA, 51 bp, synthetic construct
  misc_feature 1..51: note = Synthetic construct
  source 1..51: mol_type = other DNA
tgtgcggggctgagttattatgacaattttggctctcaaaatgactactgg

SEQ ID NO: 3755 - DNA, 45 bp, synthetic construct
  misc_feature 1..45: note = Synthetic construct
  source 1..45: mol_type = other DNA
tgttcgacatcaaagtactacgacaccttacacctctcttcctgg

SEQ ID NO: 3756 - DNA, 63 bp, synthetic construct
  misc_feature 1..63: note = Synthetic construct
  source 1..63: mol_type = other DNA
tgtgcgagagttattactagggcgagtcctggcacagacgggaggtaccgtatggacgtctgg

SEQ ID NO: 3757 - DNA, 39 bp, synthetic construct
  misc_feature 1..39: note = Synthetic construct
  source 1..39: mol_type = other DNA
tgtgcgagagagggtccggggcggggccttgactactgg

SEQ ID NO: 3758 - DNA, 42 bp, synthetic construct
  misc_feature 1..42: note = Synthetic construct
  source 1..42: mol_type = other DNA
tgtgcgagagattccctccagtatagggcttttgatatctgg

SEQ ID NO: 3759 - DNA, 72 bp, synthetic construct
  misc_feature 1..72: note = Synthetic construct
  source 1..72: mol_type = other DNA
tgtgcgagagggaatttagttcaatattttgactggtcccaagactactactactactacatggacgtctgg

SEQ ID NO: 3760 - DNA, 54 bp, synthetic construct
  misc_feature 1..54: note = Synthetic construct
  source 1..54: mol_type = other DNA
tgtgcgagagacatgtacaggatctacttctactactactacatggacgtctgg

SEQ ID NO: 3761 - DNA, 57 bp, synthetic construct
  misc_feature 1..57: note = Synthetic construct
  source 1..57: mol_type = other DNA
tgcgcgagaaatgttggcatttgcagtagtggcagctgccccccgtttgactcctgg

SEQ ID NO: 3762 - DNA, 66 bp, synthetic construct
  misc_feature 1..66: note = Synthetic construct
  source 1..66: mol_type = other DNA
tgtgcgagagaggggacgtattactatgatagtagtggttattactacaactggttcgacccctgg

SEQ ID NO: 3763 - DNA, 48 bp, synthetic construct
  misc_feature 1..48: note = Synthetic construct
  source 1..48: mol_type = other DNA
tgtgtgagggaacgtactatggatccgggagtcccctttgactactgg

SEQ ID NO: 3764 - DNA, 51 bp, synthetic construct
  misc_feature 1..51: note = Synthetic construct
  source 1..51: mol_type = other DNA
tgtgcgagagaggtggataaagctctggtcggagagctttttgactcctgg

SEQ ID NO: 3765 - DNA, 51 bp, synthetic construct
  misc_feature 1..51: note = Synthetic construct
  source 1..51: mol_type = other DNA
tgtgtgggactgtacttttatgacaacagcggcaccgaaaatgactgttgg

SEQ ID NO: 3766 - DNA, 51 bp, synthetic construct
  misc_feature 1..51: note = Synthetic construct
  source 1..51: mol_type = other DNA
tgtatgcgacgcgtggtggtgattgatactagggattcttttgacatgtgg

SEQ ID NO: 3767 - DNA, 66 bp, synthetic construct
  misc_feature 1..66: note = Synthetic construct
  source 1..66: mol_type = other DNA
tgtgcgagagccgaggcgtattacgataatttgcccggttattatgcaagtgcgtttgatatatgg

SEQ ID NO: 3768 - DNA, 69 bp, synthetic construct
  misc_feature 1..69: note = Synthetic construct
  source 1..69: mol_type = other DNA
tgcgcggcaacgattttggctaattatgatgtcgtttttgggagtgatcgccgctcctttgacttctgg

SEQ ID NO: 3769 - DNA, 90 bp, synthetic construct
  misc_feature 1..90: note = Synthetic construct
  source 1..90: mol_type = other DNA
tgtgcgcgcgtggcagcctatcacaatgcttcggggagtttccgtcctagtgggcgctcctactccttcttctactacatggacgtctgg

SEQ ID NO: 3770 - DNA, 51 bp, synthetic construct
  misc_feature 1..51: note = Synthetic construct
  source 1..51: mol_type = other DNA
tgtgcgagaggccgggggccattgagggggggaagctggttcgactcctgg

SEQ ID NO: 3771 - DNA, 60 bp, synthetic construct
  misc_feature 1..60: note = Synthetic construct
  source 1..60: mol_type = other DNA
tgtacgagaggccccagaaagtggctacaacaccaatctcgggggggctttgacatctgg

SEQ ID NO: 3772 - DNA, 54 bp, synthetic construct
  misc_feature 1..54: note = Synthetic construct
  source 1..54: mol_type = other DNA
tgtgcgagaaagggaacttatagcagtggctggtacgatgcttttgatatctgg

SEQ ID NO: 3773 - DNA, 57 bp, synthetic construct
  misc_feature 1..57: note = Synthetic construct
  source 1..57: mol_type = other DNA
tgtgcgagaggcgcccccaccgttcggggagttattaccaactggttcgacccctgg

SEQ ID NO: 3774 - DNA, 69 bp, synthetic construct
  misc_feature 1..69: note = Synthetic construct
  source 1..69: mol_type = other DNA
tgtgcgagaggcgtaagatggatggttcggggcggccggtcttactactactactacatggacgtctgg

SEQ ID NO: 3775 - DNA, 63 bp, synthetic construct
  misc_feature 1..63: note = Synthetic construct
  source 1..63: mol_type = other DNA
tgtgcgagaggctactatagggtgtggaattactatggttcgggcaactacacggacgtctgg

SEQ ID NO: 3776 - DNA, 60 bp, synthetic construct
  misc_feature 1..60: note = Synthetic construct
  source 1..60: mol_type = other DNA
tgtgcgagaggctgggcccactatagggttcggggagctaagcgttattttgactactgg

SEQ ID NO: 3777 - DNA, 57 bp, synthetic construct
  misc_feature 1..57: note = Synthetic construct
  source 1..57: mol_type = other DNA
tgtgcgagagggggccggattgtagtagtaccagctgctagctactttgactactgg

SEQ ID NO: 3778 - DNA, 48 bp, synthetic construct
  misc_feature 1..48: note = Synthetic construct
  source 1..48: mol_type = other DNA
tgtgcgagattatcatttggttcgggggatgatgcttttgatatctgg

SEQ ID NO: 3779 - DNA, 63 bp, synthetic construct
  misc_feature 1..63: note = Synthetic construct
  source 1..63: mol_type = other DNA
tgtacgagaggccttagagcagtggttggtacttcctacaactactactacatggacgtctgg

SEQ ID NO: 3780 - DNA, 84 bp, synthetic construct
  misc_feature 1..84: note = Synthetic construct
  source 1..84: mol_type = other DNA
tgtgcgagagtccttggggaggcggaatccgattatttgactggttctcatcttcgttactactactactacatggacgtctgg

SEQ ID NO: 3781 - DNA, 48 bp, synthetic construct
  misc_feature 1..48: note = Synthetic construct
  source 1..48: mol_type = other DNA
tgtgcgagaggccttgggaagcagtggttcagctgcttcgacccctgg

SEQ ID NO: 3782 - DNA, 39 bp, synthetic construct
  misc_feature 1..39: note = Synthetic construct
  source 1..39: mol_type = other DNA
tgtgcgagagttactaacagaggctggtatagggcctgg

SEQ ID NO: 3783 - DNA, 72 bp, synthetic construct
  misc_feature 1..72: note = Synthetic construct
  source 1..72: mol_type = other DNA
tgtgcgagagggggagcctattccgatttttggagtggctttccaaatgcccgagccttctttgactcctgg

SEQ ID NO: 3784 - DNA, 66 bp, synthetic construct
  misc_feature 1..66: note = Synthetic construct
  source 1..66: mol_type = other DNA
tgttcgagaggaaatgccgggatagccggtcatatttttcacttcctctactacatcgacgtctgg

SEQ ID NO: 3785 - DNA, 45 bp, synthetic construct
  misc_feature 1..45: note = Synthetic construct
  source 1..45: mol_type = other DNA
tgtgcgagagatggcccgggaaagaactacttcttggacgtctgg

SEQ ID NO: 3786 - DNA, 48 bp, synthetic construct
  misc_feature 1..48: note = Synthetic construct
  source 1..48: mol_type = other DNA
tgtgccagagtctacaatggagatggcaacaaccccattgactactgg

SEQ ID NO: 3787 - DNA, 66 bp, synthetic construct
  misc_feature 1..66: note = Synthetic construct
  source 1..66: mol_type = other DNA
tgtgccagagggtccctggatgatgatagtagtggttattactcctactactatatggacgtctgg

SEQ ID NO: 3788 - DNA, 51 bp, synthetic construct
  misc_feature 1..51: note = Synthetic construct
  source 1..51: mol_type = other DNA
tgtgccagagccaagggagatggctacattgggggcatttttgactcctgg

SEQ ID NO: 3789 - DNA, 57 bp, synthetic construct
  misc_feature 1..57: note = Synthetic construct
  source 1..57: mol_type = other DNA
tgtgcgagactgaattactatgatcgtaatggtcattactattactttgactactgg

SEQ ID NO: 3790 - DNA, 51 bp, synthetic construct
  misc_feature 1..51: note = Synthetic construct
  source 1..51: mol_type = other DNA
tgtgcgagaaacttcggtgactacgcctacccctacttctttgacttctgg

SEQ ID NO: 3791 - DNA, 54 bp, synthetic construct
  misc_feature 1..54: note = Synthetic construct
  source 1..54: mol_type = other DNA
tgtgcgagaggtattattttgagtgggtcccccctctactacctggacgtctgg

SEQ ID NO: 3792 - DNA, 42 bp, synthetic construct
  misc_feature 1..42: note = Synthetic construct
  source 1..42: mol_type = other DNA
tgtgcgagattcgcccgactagactactacatggacgtctgg

SEQ ID NO: 3793 - DNA, 69 bp, synthetic construct
  misc_feature 1..69: note = Synthetic construct
  source 1..69: mol_type = other DNA
tgtgcccgactttactggggttgtactaatggtgtatgctcctactactactactacatggacgtctgg

SEQ ID NO: 3794 - DNA, 63 bp, synthetic construct
  misc_feature 1..63: note = Synthetic construct
  source 1..63: mol_type = other DNA
tgtgcgagaatcccgaccccgaatgtgggatatacagctgggtactactacatggacgtctgg

SEQ ID NO: 3795 - DNA, 45 bp, synthetic construct
  misc_feature 1..45: note = Synthetic construct
  source 1..45: mol_type = other DNA
tgtgcgagagaaaggcatgactacgtaggagcttttgatatctgg

SEQ ID NO: 3796 - DNA, 60 bp, synthetic construct
  misc_feature 1..60: note = Synthetic construct
  source 1..60: mol_type = other DNA
tgtgcgagagaaggaagcagcagctggtacacgacctggggatgggcttttgatatctgg

SEQ ID NO: 3797 - DNA, 45 bp, synthetic construct
  misc_feature 1..45: note = Synthetic construct
  source 1..45: mol_type = other DNA
tgtgcgagagataatcagattactaaggatgcttttgatatctgg

SEQ ID NO: 3798 - DNA, 57 bp, synthetic construct
  misc_feature 1..57: note = Synthetic construct
  source 1..57: mol_type = other DNA
tgtgcgagagatcggagctatagtggctactactactactactacatggacgtctgg

SEQ ID NO: 3799 - DNA, 36 bp, synthetic construct
  misc_feature 1..36: note = Synthetic construct
  source 1..36: mol_type = other DNA
tgtgcgagcggtattggtgactactttgactactgg

SEQ ID NO: 3800 - DNA, 60 bp, synthetic construct
  misc_feature 1..60: note = Synthetic construct
  source 1..60: mol_type = other DNA
tgtgcgagacgacattcggagcagtggctgttaaggggccctggtgcttttgatatctgg

SEQ ID NO: 3801 - DNA, 48 bp, synthetic construct
  misc_feature 1..48: note = Synthetic construct
  source 1..48: mol_type = other DNA
tgtgcgagagggtcggaatggcgtctctattactactttgactactgg

SEQ ID NO: 3802 - DNA, 51 bp, synthetic construct
  misc_feature 1..51: note = Synthetic construct
  source 1..51: mol_type = other DNA
tgtgcgagacgggtggtggtagatcctactctcgggtcatttgatatctgg

SEQ ID NO: 3803 - DNA, 36 bp, synthetic construct
  misc_feature 1..36: note = Synthetic construct
  source 1..36: mol_type = other DNA
tgtgcgagagatcgcaggggatacagcttttactgg

SEQ ID NO: 3804 - DNA, 63 bp, synthetic construct
  misc_feature 1..63: note = Synthetic construct
  source 1..63: mol_type = other DNA
tgtgcgagagagttttattactctgatagtaatgattttccatttcatgtttttgatatctgg

SEQ ID NO: 3805 - DNA, 39 bp, synthetic construct
  misc_feature 1..39: note = Synthetic construct
  source 1..39: mol_type = other DNA
tgtgcgagagagggtataggcggagctactgatatctgg

SEQ ID NO: 3806 - DNA, 57 bp, synthetic construct
  misc_feature 1..57: note = Synthetic construct
  source 1..57: mol_type = other DNA
tgtgcgagagatctcggctacggtggtaactccccccactggtacttcgatctctgg

SEQ ID NO: 3807 - DNA, 48 bp, synthetic construct
  misc_feature 1..48: note = Synthetic construct
  source 1..48: mol_type = other DNA
tgtgcgagagcggactacggtgactacgaggactactttgactactgg

SEQ ID NO: 3808 - DNA, 39 bp, synthetic construct
  misc_feature 1..39: note = Synthetic construct
  source 1..39: mol_type = other DNA
tgtgcgagaggcggcggaggggggtggttcgacccctgg

SEQ ID NO: 3809 - DNA, 54 bp, synthetic construct
  misc_feature 1..54: note = Synthetic construct
  source 1..54: mol_type = other DNA
tgtgcgagagggggactctatggttcggggagagtaaactggttcgacccctgg

SEQ ID NO: 3810 - DNA, 42 bp, synthetic construct
  misc_feature 1..42: note = Synthetic construct
  source 1..42: mol_type = other DNA
tgtgcgagatcccgttcgaggcagcagccaaatgactactgg

SEQ ID NO: 3811 - DNA, 48 bp, synthetic construct
  misc_feature 1..48: note = Synthetic construct
  source 1..48: mol_type = other DNA
tgtgcgagagatcgtaagggtagtgacggtgatagcatggacgtctgg

SEQ ID NO: 3812 - DNA, 63 bp, synthetic construct
  misc_feature 1..63: note = Synthetic construct
  source 1..63: mol_type = other DNA
tgtgcgagggcccgacaccgatactacgattctttgactggccaggggtcctttgattactgg

SEQ ID NO: 3813 - DNA, 42 bp, synthetic construct
  misc_feature 1..42: note = Synthetic construct
  source 1..42: mol_type = other DNA
tgtgtgagagggggagatatagagactaccatggagttctgg

SEQ ID NO: 3814 - DNA, 54 bp, synthetic construct
  misc_feature 1..54: note = Synthetic construct
  source 1..54: mol_type = other DNA
tgtgcgcgaaatgggcctaagtggaacaattactactactacatggacgtctgg

SEQ ID NO: 3815 - DNA, 48 bp, synthetic construct
  misc_feature 1..48: note = Synthetic construct
  source 1..48: mol_type = other DNA
tgtgtgaggacccttagagatggcttcaattcctggttcgacccctgg

SEQ ID NO: 3816 - DNA, 51 bp, synthetic construct
  misc_feature 1..51: note = Synthetic construct
  source 1..51: mol_type = other DNA
tgtgcgagaggcccacccatagacgactactactactacatggacgtctgg

SEQ ID NO: 3817 - DNA, 69 bp, synthetic construct
  misc_feature 1..69: note = Synthetic construct
  source 1..69: mol_type = other DNA
tgtactagacatctgatgaattttgatttctggagtggctattatacggtgaacgcttttgatatctgg

SEQ ID NO: 3818 - DNA, 51 bp, synthetic construct
  misc_feature 1..51: note = Synthetic construct
  source 1..51: mol_type = other DNA
tgtgcgagaaggacatatgctgttaacggtgattactactttgactcctgg

SEQ ID NO: 3819 - DNA, 69 bp, synthetic construct
  misc_feature 1..69: note = Synthetic construct
  source 1..69: mol_type = other DNA
tgtgcgcgaggccttttttattttgggtcggggacttatgcacgagatccacggagttgggggtactgg

SEQ ID NO: 3820 - DNA, 66 bp, synthetic construct
  misc_feature 1..66: note = Synthetic construct
  source 1..66: mol_type = other DNA
tgtgcgagaggggaggcgatagtattgtttggggagctgttaaaacgcccttatatggatgtctgg

SEQ ID NO: 3821 - DNA, 54 bp, synthetic construct
  misc_feature 1..54: note = Synthetic construct
  source 1..54: mol_type = other DNA
tgtgcgagaggctcagcacgtctagcagcaggaagaagtgcttttgatttctgg

SEQ ID NO: 3822 - DNA, 57 bp, synthetic construct
  misc_feature 1..57: note = Synthetic construct
  source 1..57: mol_type = other DNA
tgtgcgaggacccccccatatagtggctacgattacgaaggctactttgactactgg

SEQ ID NO: 3823 - DNA, 51 bp, synthetic construct
  misc_feature 1..51: note = Synthetic construct
  source 1..51: mol_type = other DNA
tgtgcgagaggggactggtttcagggtagtggccttccttttgactcctgg

SEQ ID NO: 3824 - DNA, 42 bp, synthetic construct
  misc_feature 1..42: note = Synthetic construct
  source 1..42: mol_type = other DNA
tgtgccagggctgggaggggcccaagtgtctttgactactgg

SEQ ID NO: 3825 - DNA, 51 bp, synthetic construct
  misc_feature 1..51: note = Synthetic construct
  source 1..51: mol_type = other DNA
tgtgcgacgtatgattcggggagttattaccaatctcccttagacttctgg

SEQ ID NO: 3826 - DNA, 48 bp, synthetic construct
  misc_feature 1..48: note = Synthetic construct
  source 1..48: mol_type = other DNA
tgtgcgagacattcagattggatacagttgtggttctttgacttctgg

SEQ ID NO: 3827 - DNA, 90 bp, synthetic construct
  misc_feature 1..90: note = Synthetic construct
  source 1..90: mol_type = other DNA
tgtgcgcgagtggcagcgtatcacaatgcttcggggagtttccgtcctagtgggcgctcctactccttcttctactacatggacgtctgg

SEQ ID NO: 3828 - DNA, 48 bp, synthetic construct
  misc_feature 1..48: note = Synthetic construct
  source 1..48: mol_type = other DNA
tgtgcgagaatgggggcatatggcagtggcttttatgggggatactgg

SEQ ID NO: 3829 - DNA, 24 bp, synthetic construct
  misc_feature 1..24: note = Synthetic construct
  source 1..24: mol_type = other DNA
tgtacgagaagtgatagacactgg

SEQ ID NO: 3830 - DNA, 60 bp, synthetic construct
  misc_feature 1..60: note = Synthetic construct
  source 1..60: mol_type = other DNA
tgtgcgagacacggaggaagtacaccccactatattcgagtgaactggttcggcccctgg

SEQ ID NO: 3831 - DNA, 48 bp, synthetic construct
  misc_feature 1..48: note = Synthetic construct
  source 1..48: mol_type = other DNA
tgtgcgagacaaacttcgcttgggggagttatcgcttttgacatctgg

SEQ ID NO: 3832 - DNA, 75 bp, synthetic construct
  misc_feature 1..75: note = Synthetic construct
  source 1..75: mol_type = other DNA
tgtgcgacccatcctcgtgggacatttgagggagcccatgactattactactactactactacatggacgtctgg

SEQ ID NO: 3833 - DNA, 45 bp, synthetic construct
  misc_feature 1..45: note = Synthetic construct
  source 1..45: mol_type = other DNA
tgtgcgagacacccctacggtggtaactccgggcaggactactgg

SEQ ID NO: 3834 - DNA, 60 bp, synthetic construct
  misc_feature 1..60: note = Synthetic construct
  source 1..60: mol_type = other DNA
tgtgcgagatcaattcctttggaatatagtagtcaaacggggggtttgttcgacccctgg

SEQ ID NO: 3835 - DNA, 69 bp, synthetic construct
  misc_feature 1..69: note = Synthetic construct
  source 1..69: mol_type = other DNA
tgtgcgagacggccgcccggcgattgtactaatggtgtatgctccacgcaaaggtggttcgacccctgg

SEQ ID NO: 3836 - DNA, 54 bp, synthetic construct
  misc_feature 1..54: note = Synthetic construct
  source 1..54: mol_type = other DNA
tgtgcgagagctagcagctcgtccaaatactactactactacatggacgtctgg

SEQ ID NO: 3837 - DNA, 48 bp, synthetic construct
  misc_feature 1..48: note = Synthetic construct
  source 1..48: mol_type = other DNA
tgtgcgagacggggagtgggagctacgaggaaggcttttgatatctgg

SEQ ID NO: 3838 - DNA, 57 bp, synthetic construct
  misc_feature 1..57: note = Synthetic construct
  source 1..57: mol_type = other DNA
tgtgtgagacacgactacagtagcttttactactactactacttcatggacgtctgg

SEQ ID NO: 3839 - DNA, 36 bp, synthetic construct
  misc_feature 1..36: note = Synthetic construct
  source 1..36: mol_type = other DNA
tgtgcgagcgcattagcagctggtaaatactactgg

SEQ ID NO: 3840 - DNA, 45 bp, synthetic construct
  misc_feature 1..45: note = Synthetic construct
  source 1..45: mol_type = other DNA
tgtgcgagactcttaagcctgaggaatgcggcttttgatatctgg

SEQ ID NO: 3841 - DNA, 54 bp, synthetic construct
  misc_feature 1..54: note = Synthetic construct
  source 1..54: mol_type = other DNA
tgtgcgagagattatattgatgtaacccacggctacagttgtttcgacccctgg

SEQ ID NO: 3842 - DNA, 63 bp, synthetic construct
  misc_feature 1..63: note = Synthetic construct
  source 1..63: mol_type = other DNA
tgtgcgagagactttgatcaaggatattattcttcggggagttattcctggttcgacgcctgg

SEQ ID NO: 3843 - DNA, 51 bp, synthetic construct
  misc_feature 1..51: note = Synthetic construct
  source 1..51: mol_type = other DNA
tgtgtgagagggggccgggcaactttgaccaacgcggactttgactactgg

SEQ ID NO: 3844 - DNA, 51 bp, synthetic construct
  misc_feature 1..51: note = Synthetic construct
  source 1..51: mol_type = other DNA
tgtgcgagaacatatagtagtggttattatagtgatgcttttgatatctgg

SEQ ID NO: 3845 - DNA, 51 bp, synthetic construct
  misc_feature 1..51: note = Synthetic construct
  source 1..51: mol_type = other DNA
tgtgtgagaaccccagcgttaggggagttagttggatacttccagccctgg

SEQ ID NO: 3846 - DNA, 63 bp, synthetic construct
  misc_feature 1..63: note = Synthetic construct
  source 1..63: mol_type = other DNA
tgtgcgagagacgcatataattactatgcttcgaggagccgatacggttactttgactactgg

SEQ ID NO: 3847 - DNA, 63 bp, synthetic construct
  misc_feature 1..63: note = Synthetic construct
  source 1..63: mol_type = other DNA
tgtgcgcgagacgggacgccggctgagcgacggtcctactcctactcctacatggacgtctgg

SEQ ID NO: 3848 - DNA, 42 bp, synthetic construct
  misc_feature 1..42: note = Synthetic construct
  source 1..42: mol_type = other DNA
tgtgcgagaggggagtatctcggctactacatggacgtctgg

SEQ ID NO: 3849 - DNA, 69 bp, synthetic construct
  misc_feature 1..69: note = Synthetic construct
  source 1..69: mol_type = other DNA
tgtgcgagaatgccgaatcttatggatacagctatggtttcctactactactactacatggacgtctgg

SEQ ID NO: 3850 - DNA, 48 bp, synthetic construct
  misc_feature 1..48: note = Synthetic construct
  source 1..48: mol_type = other DNA
tgtgcgagaggggatgatagtagtggttatgccccctttgactactgg

SEQ ID NO: 3851 - DNA, 45 bp, synthetic construct
  misc_feature 1..45: note = Synthetic construct
  source 1..45: mol_type = other DNA
tgtgcgagagtcaatactatggttcggggaacttttgactactgg

SEQ ID NO: 3852 - DNA, 66 bp, synthetic construct
  misc_feature 1..66: note = Synthetic construct
  source 1..66: mol_type = other DNA
tgtgcgtcaacgtattactatgatagtagtgggggaagacgggttcctgttgcttttgaaatctgg

SEQ ID NO: 3853 - DNA, 57 bp, synthetic construct
  misc_feature 1..57: note = Synthetic construct
  source 1..57: mol_type = other DNA
tgtgcgtcgaggggttcggggagttattataaagggggttactactttgactactgg

SEQ ID NO: 3854 - DNA, 63 bp, synthetic construct
  misc_feature 1..63: note = Synthetic construct
  source 1..63: mol_type = other DNA
tgtgcgagagcgatggattactctgatagtagtggtgattattactattacttcgatctctgg

SEQ ID NO: 3855 - DNA, 54 bp, synthetic construct
  misc_feature 1..54: note = Synthetic construct
  source 1..54: mol_type = other DNA
tgtgtgagagagagctcttatggttcggggactagcaaatacttcgacccctgg

SEQ ID NO: 3856 - DNA, 45 bp, synthetic construct
  misc_feature 1..45: note = Synthetic construct
  source 1..45: mol_type = other DNA
tgtgtgagacgctggtacggtgactaccccgcctttgactactgg

SEQ ID NO: 3857 - DNA, 54 bp, synthetic construct
  misc_feature 1..54: note = Synthetic construct
  source 1..54: mol_type = other DNA
tgtgcgagagtcttgtgtagtggtcgtaagtgccaaggggatttcgactactgg

SEQ ID NO: 3858 - DNA, 60 bp, synthetic construct
  misc_feature 1..60: note = Synthetic construct
  source 1..60: mol_type = other DNA
tgtgcgagacttatggagtcttctgaccccgctaattacttctcctacatggacgtctgg

SEQ ID NO: 3859 - DNA, 57 bp, synthetic construct
  misc_feature 1..57: note = Synthetic construct
  source 1..57: mol_type = other DNA
tgtgcgaccctgagttcttattatgatattttgactggtttggcctcggacgtctgg

SEQ ID NO: 3860 - DNA, 48 bp, synthetic construct
  misc_feature 1..48: note = Synthetic construct
  source 1..48: mol_type = other DNA
tgtgcggggagacgctcggggaggggtgattactactttgaattgtgg

SEQ ID NO: 3861 - DNA, 48 bp, synthetic construct
  misc_feature 1..48: note = Synthetic construct
  source 1..48: mol_type = other DNA
tgtgcgagagaaggttactatgatggtagtggttattacactcactgg

SEQ ID NO: 3862 - DNA, 39 bp, synthetic construct
  misc_feature 1..39: note = Synthetic construct
  source 1..39: mol_type = other DNA
tgtgcgagagtgggcattgcagcaggtgtcgacgtctgg

SEQ ID NO: 3863 - DNA, 72 bp, synthetic construct
  misc_feature 1..72: note = Synthetic construct
  source 1..72: mol_type = other DNA
tgcgcgagagagagggcggattacgatctttttactggttatccctcacgcccagatgcttttgaaatctgg

SEQ ID NO: 3864 - DNA, 60 bp, synthetic construct
  misc_feature 1..60: note = Synthetic construct
  source 1..60: mol_type = other DNA
tgtgcgagacgcctggggtgggaacagggcggccgtcactcctactacatggacgtctgg

SEQ ID NO: 3865 - DNA, 54 bp, synthetic construct
  misc_feature 1..54: note = Synthetic construct
  source 1..54: mol_type = other DNA
tgtgccagagatgggggctacgatgcagtcttattctactacctgggcgtctgg

SEQ ID NO: 3866 - DNA, 42 bp, synthetic construct
  misc_feature 1..42: note = Synthetic construct
  source 1..42: mol_type = other DNA
tgtgggaggatccatgatagtggttggttcgttctttattgg

SEQ ID NO: 3867 - DNA, 51 bp, synthetic construct
  misc_feature 1..51: note = Synthetic construct
  source 1..51: mol_type = other DNA
tgtgcgaggcacccgcggaagttcggggagttattgggatttgactcctgg

SEQ ID NO: 3868 - DNA, 54 bp, synthetic construct
  misc_feature 1..54: note = Synthetic construct
  source 1..54: mol_type = other DNA
tgtgcggcggagggaggtgattgtcttaatggtgtgtgctataaagtctcctgg

SEQ ID NO: 3869 - DNA, 39 bp, synthetic construct
  misc_feature 1..39: note = Synthetic construct
  source 1..39: mol_type = other DNA
tgtgcgagaggtctgtcctcagtggctggcacggggtgg

SEQ ID NO: 3870 - DNA, 51 bp, synthetic construct
  misc_feature 1..51: note = Synthetic construct
  source 1..51: mol_type = other DNA
tgtgcatcagcagagcagtggcccacggagcacgacgcttttgatatctgg

SEQ ID NO: 3871 - DNA, 66 bp, synthetic construct; identical to SEQ ID NO: 1774
  misc_feature 1..66: note = Synthetic construct
  source 1..66: mol_type = other DNA

SEQ ID NO: 3872 - DNA, 57 bp, synthetic construct
  misc_feature 1..57: note = Synthetic construct
  source 1..57: mol_type = other DNA
tgtgcgagaggaggcggtgggttcagtcatggccgcctcaaggctcttgatgtctgg

SEQ ID NO: 3873 - DNA, 54 bp, synthetic construct
  misc_feature 1..54: note = Synthetic construct
  source 1..54: mol_type = other DNA
tgcgcgagagtcggcctgttgcagcaggtggcccatgatgctttggatatctgg

SEQ ID NO: 3874 - DNA, 51 bp, synthetic construct
  misc_feature 1..51: note = Synthetic construct
  source 1..51: mol_type = other DNA
tgtgcgagaccttgtagtggtgctaactgcttcaacacggcgggtctctgg

SEQ ID NO: 3875 - DNA, 57 bp, synthetic construct
  misc_feature 1..57: note = Synthetic construct
  source 1..57: mol_type = other DNA
tgtacgagaggccggctgattttcagcagcagccggtacgatgcttttgatatctgg

SEQ ID NO: 3876 - DNA, 51 bp, synthetic construct
  misc_feature 1..51: note = Synthetic construct
  source 1..51: mol_type = other DNA
tgtgcgagagatatggggcgtattggaagtagcaccgaatttgactgctgg

SEQ ID NO: 3877 - DNA, 45 bp, synthetic construct
  misc_feature 1..45: note = Synthetic construct
  source 1..45: mol_type = other DNA
tgtgcaacagatcggcgagtggaaactctctactttcacttctgg

SEQ ID NO: 3878 - DNA, 51 bp, synthetic construct
  misc_feature 1..51: note = Synthetic construct
  source 1..51: mol_type = other DNA
tgtgtacgcgactatgattacgttgggggcagttatcgtcttgaccggtgg

SEQ ID NO: 3879 - DNA, 51 bp, synthetic construct
  misc_feature 1..51: note = Synthetic construct
  source 1..51: mol_type = other DNA
tgtgcgagacttctcaaggggtccagttggtacaatggtcttgacatctgg

SEQ ID NO: 3880 - DNA, 48 bp, synthetic construct
  misc_feature 1..48: note = Synthetic construct
  source 1..48: mol_type = other DNA
tgtgcgaaacggtataatactacccacctttggtactttgactcctgg

SEQ ID NO: 3881 - DNA, 75 bp, synthetic construct
  misc_feature 1..75: note = Synthetic construct
  source 1..75: mol_type = other DNA
caggtgcagctggtacagtctggagctgaggtgaagaagcctggggcctcagtgaaggtctcttgtaaggcttcc

SEQ ID NO: 3882 - DNA, 22 bp, synthetic construct
  misc_feature 1..22: note = Synthetic construct
  source 1..22: mol_type = other DNA
tgtatgggcatgcaaggcctct

SEQ ID NO: 3883 - DNA, 75 bp, synthetic construct
  misc_feature 1..75: note = Synthetic construct
  source 1..75: mol_type = other DNA
caggtccagctggtgcagtctggggctgaggtgaagaagcctgggtcctcggtgaaggtctcctgcgagacctct

SEQ ID NO: 3884 - DNA, 75 bp, synthetic construct
  misc_feature 1..75: note = Synthetic construct
  source 1..75: mol_type = other DNA
gaggtgcagctggtggagtctgggggaggcttggtccagcctggggggtccctgaaactctcctgtgcagcctct

SEQ ID NO: 3885 - DNA, 75 bp, synthetic construct
  misc_feature 1..75: note = Synthetic construct
  source 1..75: mol_type = other DNA
caggtgcacctggtggagtctgggggaggcgtggtccagcctgggaggtccctgagactctcctgtgcggcctct

SEQ ID NO: 3886 - DNA, 75 bp, synthetic construct
  misc_feature 1..75: note = Synthetic construct
  source 1..75: mol_type = other DNA
caggtgcacctggtggagtccgggggaggcgtggtccagcctgggaggtccctgagactctcgtgtgtaggctct

SEQ ID NO: 3887 - DNA, 75 bp, synthetic construct
  misc_feature 1..75: note = Synthetic construct
  source 1..75: mol_type = other DNA
gaggtgcagttggtggagtctgggggaggcttggtccagccgggggggtccctaagactctcctgtgcagcctca

SEQ ID NO: 3888 - DNA, 75 bp, synthetic construct
  misc_feature 1..75: note = Synthetic construct
  source 1..75: mol_type = other DNA
gagatgcagctggtggagtccgggggaggcttggtccagccgggggggtccctgagactctcctgtgcagcctct

SEQ ID NO: 3889 - DNA, 75 bp, synthetic construct
  misc_feature 1..75: note = Synthetic construct
  source 1..75: mol_type = other DNA
gaggtgcggctggtggagtctggggggggcttggtccagcctggggggtccctgaaactctcctgtgaagcgtct

SEQ ID NO: 3890 - DNA, 75 bp, synthetic construct
  misc_feature 1..75: note = Synthetic construct
  source 1..75: mol_type = other DNA
gaggtccagttggtacagtccggggctgaggtgaagaagcctggggccaccgtgaaaatctcctgcaaggcttct

SEQ ID NO: 3891 - DNA, 75 bp, synthetic construct
  misc_feature 1..75: note = Synthetic construct
  source 1..75: mol_type = other DNA
caggtgcagttggtgcagtctggggctgaggtgaagaagcctggggcctcagtgaagatttcctgcaagtcatct

SEQ ID NO: 3892 - DNA, 75 bp, synthetic construct
  misc_feature 1..75: note = Synthetic construct
  source 1..75: mol_type = other DNA
caggtgcagctggtgcagtctggggctgaggtgaagaagcctggggcctcagtgaaggtctcctgtaaggcttct

SEQ ID NO: 3893 - DNA, 75 bp, synthetic construct
  misc_feature 1..75: note = Synthetic construct
  source 1..75: mol_type = other DNA
caagtgcaactggtgcagtctggggctgaggtgaagaagcctggggcctcagtgaaggtctcctgcaaggcttct

SEQ ID NO: 3894 - DNA, 75 bp, synthetic construct
  misc_feature 1..75: note = Synthetic construct
  source 1..75: mol_type = other DNA
caggtacagctggtgcagtctgggtctgagttgaagaagcctggggcctcagtgacggtttcctgcaaggcttct

SEQ ID NO: 3895 - DNA, 75 bp, synthetic construct
  misc_feature 1..75: note = Synthetic construct
  source 1..75: mol_type = other DNA
caggtgcagctggtgcagtctggggctgaggtgaaggagcctggggcctcagtgaaggtctcctgcaaggcttct

SEQ ID NO: 3896 - DNA, 75 bp, synthetic construct
  misc_feature 1..75: note = Synthetic construct
  source 1..75: mol_type = other DNA
caggtgcaactggtgcagtctggggctgaggtgaaggagcctggggcctcagtgaaaatttcctgcaaggcatct

SEQ ID NO: 3897 - DNA, 75 bp, synthetic construct
  misc_feature 1..75: note = Synthetic construct
  source 1..75: mol_type = other DNA
caggtccaccttctgcagtctggggctgaggtgaagaagcctggggcctcagtgaaggtttcctgcgaggcttct

SEQ ID NO: 3898 - DNA, 75 bp, synthetic construct
  misc_feature 1..75: note = Synthetic construct
  source 1..75: mol_type = other DNA
caggaacttttgatacagtctggggctgaggtgaagaagcctggggcctcagtgagggtctcctgcgcggcttct

SEQ ID NO: 3899 - DNA, 75 bp, synthetic construct
  misc_feature 1..75: note = Synthetic construct
  source 1..75: mol_type = other DNA
caggtccagcttgtgcagtctggggctgaggtgaagaagcctggggcctcagtgaaggtttcctgcaaggcttct

SEQ ID NO: 3900 - DNA, 75 bp, synthetic construct
  misc_feature 1..75: note = Synthetic construct
  source 1..75: mol_type = other DNA
caggtccaacttgtgcagtctggggctgaggtggagaagcctggggcctcggtgaaggtttcctgcaaggcttct

SEQ ID NO: 3901 - DNA, 75 bp, synthetic construct
  misc_feature 1..75: note = Synthetic construct
  source 1..75: mol_type = other DNA
caggtccagcttgtgcagtctggggctgaggtgaagaagcctggggcctcagtgaaggtttcctgcaaggcctct

SEQ ID NO: 3902 - DNA, 75 bp, synthetic construct
  misc_feature 1..75: note = Synthetic construct
  source 1..75: mol_type = other DNA
caggtgcagctggtgcagtctgtggctgaggtgaagaagcctggggcctcagtgaaggtctcctgcaaggcttct

SEQ ID NO: 3903 - DNA, 75 bp, synthetic construct
  misc_feature 1..75: note = Synthetic construct
  source 1..75: mol_type = other DNA
gaggtccagctgatacaatccggggctgaggtgaagaagcctgggacgaccgtgaaagtctcctgcaagacgtct

SEQ ID NO: 3904 - DNA, 75 bp, synthetic construct
  misc_feature 1..75: note = Synthetic construct
  source 1..75: mol_type = other DNA
gaggtccggctggcacagtccggggctgaggtgaagaagcctggggccaccatgaaaatctcctgcaaggcttct

SEQ ID NO: 3905 - DNA, 75 bp, synthetic construct
  misc_feature 1..75: note = Synthetic construct
  source 1..75: mol_type = other DNA
caggtgcagctggtgcagtctggggctgaggtgaagaagcctggggcctctgtgaaggtctcctgcaaggcttct

SEQ ID NO: 3906 - DNA, 75 bp, synthetic construct
  misc_feature 1..75: note = Synthetic construct
  source 1..75: mol_type = other DNA
caggtgcagctggtgcaatctggggctgaggtgaagaagcctggggcctcagtgaaggtctcctgcaaggcttct

SEQ ID NO: 3907 - DNA, 75 bp, synthetic construct
  misc_feature 1..75: note = Synthetic construct
  source 1..75: mol_type = other DNA
caggtgcagctggtgcagtctggggctgaggtgaagaagcctggggcctcagtgaaggtctcctgcaaggcttct

SEQ ID NO: 3908 - DNA, 75 bp, synthetic construct
  misc_feature 1..75: note = Synthetic construct
  source 1..75: mol_type = other DNA
caggtgcagctggtgcagtctggggctgaggtgaagaacactggggcctcagtgaaggtctcctgcaaggcttct

SEQ ID NO: 3909 - DNA, 75 bp, synthetic construct
  misc_feature 1..75: note = Synthetic construct
  source 1..75: mol_type = other DNA
caggtgcagctggtgcagtctggggctgaggtgaagaagcctggggcctcagtgagggtctcctgcgaggcttct

SEQ ID NO: 3910 - DNA, 75 bp, synthetic construct
  misc_feature 1..75: note = Synthetic construct
  source 1..75: mol_type = other DNA
caggtgcagctggtgcagtctggggctgaggtgaagaagcctggggcctcagtgaaggtctcctgcgaggcttct

SEQ ID NO: 3911 - DNA, 75 bp, synthetic construct
  misc_feature 1..75: note = Synthetic construct
  source 1..75: mol_type = other DNA
caggtccagctggtgcagtctggggctgaggtgaagaagcctgggtcctcggtgaaggtctcctgcaaggcttct

SEQ ID NO: 3912 - DNA, 75 bp, synthetic construct
  misc_feature 1..75: note = Synthetic construct
  source 1..75: mol_type = other DNA
caggtccagttggtgcagtctggggctgaggtgaagaagcctgggtcctcggtgaaggtctcctgccaggcttct

SEQ ID NO: 3913 - DNA, 75 bp, synthetic construct
  misc_feature 1..75: note = Synthetic construct
  source 1..75: mol_type = other DNA
caggttcagctggtgcagtctggagctgaggtgaagaagcctggggcctcagtgaaggtctcctgcaaggcttct

SEQ ID NO: 3914 - DNA, 75 bp, synthetic construct; identical to SEQ ID NO: 1778
  misc_feature 1..75: note = Synthetic construct
  source 1..75: mol_type = other DNA

SEQ ID NO: 3915 - DNA, 75 bp, synthetic construct
  misc_feature 1..75: note = Synthetic construct
  source 1..75: mol_type = other DNA
caggtgcagctggagcaatctgggtctgagtttaagaagcctggggcctcagtgaagatttcctgcaaggcttct

SEQ ID NO: 3916 - DNA, 75 bp, synthetic construct
  misc_feature 1..75: note = Synthetic construct
  source 1..75: mol_type = other DNA
caggtccagttggtgcagtctggggctgaggtgaagaagcctgggtcctcggtgaaggtctcctgcaaggcttct

SEQ ID NO: 3917 - DNA, 75 bp, synthetic construct
  misc_feature 1..75: note = Synthetic construct
  source 1..75: mol_type = other DNA
caggtccagctggtgcagtctggggctgaggtgaaggagcctgggtcctcggtgaaggtctcctgcaaggcttct

SEQ ID NO: 3918 - DNA, 75 bp, synthetic construct
  misc_feature 1..75: note = Synthetic construct
  source 1..75: mol_type = other DNA
caggttcacctggtgcagtctggcgctgaagtgaagaagcctggggcctcagtgaaagtctcctgcaagacttct

SEQ ID NO: 3919 - DNA, 75 bp, synthetic construct
  misc_feature 1..75: note = Synthetic construct
  source 1..75: mol_type = other DNA
caggtccagctggtgcaatctggggctgaggtgaagaagcctgggtcctcggttaaggtctcctgcaaggcttct

SEQ ID NO: 3920 - DNA, 75 bp, synthetic construct
  misc_feature 1..75: note = Synthetic construct
  source 1..75: mol_type = other DNA
caggttcagctggtgcagtctggagctgaggtgaacaagcctggggcctcagtgaaggtctcctgtagggctttt

SEQ ID NO: 3921 - DNA, 75 bp, synthetic construct
  misc_feature 1..75: note = Synthetic construct
  source 1..75: mol_type = other DNA
caggttcagctggtgcaatctggaggtgaggtgaagaagcctggggcctcagtgaaggtctcctgcaaggcttct

SEQ ID NO: 3922 - DNA, 75 bp, synthetic construct
  misc_feature 1..75: note = Synthetic construct
  source 1..75: mol_type = other DNA
caggtccaactggtgcagtctggggctgaggtgaagaagccggggtcctcggtgaaggtctcctgcaaggctcct

SEQ ID NO: 3923 - DNA, 75 bp, synthetic construct
  misc_feature 1..75: note = Synthetic construct
  source 1..75: mol_type = other DNA
caggtgcagctggtgcagtcaggagccgaggtgaagaaaccaggcagctccgtgaaggtcagctgcaaagcttcc

SEQ ID NO: 3924 - DNA, 75 bp, synthetic construct
  misc_feature 1..75: note = Synthetic construct
  source 1..75: mol_type = other DNA
caggtccacctggtgcagtctggggctgaagtgaagaagcctgggtcgtcggtaaaggtctcttgcaaggcttct

SEQ ID NO: 3925 - DNA, 75 bp, synthetic construct
  misc_feature 1..75: note = Synthetic construct
  source 1..75: mol_type = other DNA
caggttcaacttgtgcagtctggagctgaggtgaagaagcctggggcctcagtgaaggtctcctgtaaggcttct

SEQ ID NO: 3926 - DNA, 75 bp, synthetic construct
  misc_feature 1..75: note = Synthetic construct
  source 1..75: mol_type = other DNA
caggtccaactggtgcagtctggggctgaggtgaagaagcctgggtcctcggtgaaggtctcctgcaaggcttct

SEQ ID NO: 3927 - DNA, 75 bp, synthetic construct
  misc_feature 1..75: note = Synthetic construct
  source 1..75: mol_type = other DNA
caggtccagttggtgcagtctggggctgaggtgaagaagactgggtcctcggtgaaggtctcctgcaaggcctct

SEQ ID NO: 3928 - DNA, 75 bp, synthetic construct
  misc_feature 1..75: note = Synthetic construct
  source 1..75: mol_type = other DNA
caggtccagctggtgcagtcaggggctgaggtgaagaagcctgggtcctcggtgaaggtctcctgcaaggcttct

SEQ ID NO: 3929 - DNA, 75 bp, synthetic construct
  misc_feature 1..75: note = Synthetic construct
  source 1..75: mol_type = other DNA
caggtccagctggtgcagtctggggctgaggtgaagaagcctgggtcctcggtgaaggtctcctgcacggcttct

SEQ ID NO: 3930 - DNA, 75 bp, synthetic construct
  misc_feature 1..75: note = Synthetic construct
  source 1..75: mol_type = other DNA
cagattcagctggtgcagtctggaggtgaggtgaagaagcctggggcctcagtgaaggtctcctgcaaggcttct

SEQ ID NO: 3931 - DNA, 75 bp, synthetic construct
  misc_feature 1..75: note = Synthetic construct
  source 1..75: mol_type = other DNA
caggttaagatggtgcagtctggagctgaggtgaagaagcctggggcctcagtgaaggtctcctgcaaggcttct

SEQ ID NO: 3932 - DNA, 75 bp, synthetic construct
  misc_feature 1..75: note = Synthetic construct
  source 1..75: mol_type = other DNA
caggttcagctggtgcagtctggagctgaggtgaagaagcctggggcctcagtgaaggtctcctgcaaggcctct

SEQ ID NO: 3933 - DNA, 75 bp, synthetic construct
  misc_feature 1..75: note = Synthetic construct
  source 1..75: mol_type = other DNA
caggttcagctggtgcagtctggaggtgaggtgaagaagcctggggcctcagtgagggtctcctgcaaggcttct

SEQ ID NO: 3934 - DNA, 75 bp, synthetic construct
  misc_feature 1..75: note = Synthetic construct
  source 1..75: mol_type = other DNA
caggtccagctggtacaatctggggctgaggtgaagaagccggggtcctcggtgaaggtctcctgcacggcttct

SEQ ID NO: 3935 - DNA, 75 bp, synthetic construct
  misc_feature 1..75: note = Synthetic construct
  source 1..75: mol_type = other DNA
caggtccaactggtacaatctggggctgaggtgaagaagcctgggtcctcggtgaaagtctcctgcaaggcttcc

SEQ ID NO: 3936 - DNA, 75 bp, synthetic construct
  misc_feature 1..75: note = Synthetic construct
  source 1..75: mol_type = other DNA
caggttcagctggtgcagtccggagctgaggtgaagaagcctggggcctcagtgagggtctcctgcacggcctct

SEQ ID NO: 3937 - DNA, 75 bp, synthetic construct
  misc_feature 1..75: note = Synthetic construct
  source 1..75: mol_type = other DNA
caggtccagttggtgcagtctggggctgaggtgatgcagcctgggtccgcggtgaaggtctcctgcgaggcttct

SEQ ID NO: 3938 - DNA, 75 bp, synthetic construct
  misc_feature 1..75: note = Synthetic construct
  source 1..75: mol_type = other DNA
caggtccagctggtgcagtctggggctgaaatgaagaagcctgggtcctcggtgaaggtctcctgcaaggcctct

SEQ ID NO: 3939 - DNA, 75 bp, synthetic construct
  misc_feature 1..75: note = Synthetic construct
  source 1..75: mol_type = other DNA
caggttcagttggtgcagtctggaggcgaggtgaggaagcctggggcctcactgaaggtctcctgccaggcttct

SEQ ID NO: 3940 - DNA, 75 bp, synthetic construct
  misc_feature 1..75: note = Synthetic construct
  source 1..75: mol_type = other DNA
caggtgcagctggtgcagtctggggctgaggtgaagaagcctgggtcctcggtgaaggtctcctgcaaggcttct

SEQ ID NO: 3941 - DNA, 75 bp, synthetic construct
  misc_feature 1..75: note = Synthetic construct
  source 1..75: mol_type = other DNA
caagttgagatggtacagtcaggagctgaggtgaagaagcctggggcctcagtgaaggtctcctgcaaggcttct

SEQ ID NO: 3942 - DNA, 75 bp, synthetic construct
  misc_feature 1..75: note = Synthetic construct
  source 1..75: mol_type = other DNA
caggtccagctggtgcagtctggggctgaggtgaagaggcctgggtcctcggtgacgatctcctgcaagacttct

SEQ ID NO: 3943 - DNA, 75 bp, synthetic construct
  misc_feature 1..75: note = Synthetic construct
  source 1..75: mol_type = other DNA
caggtgcagttgctgcaatctgggtctgaggtggagaggcctggggcctcagtgaaggttgcctgcaaggcttcc

SEQ ID NO: 3944 - DNA, 75 bp, synthetic construct
  misc_feature 1..75: note = Synthetic construct
  source 1..75: mol_type = other DNA
gaggtccaactggtacagtccggggctgaggtgaagaagcctggggccaccgtgaaaatctcctgcaatgcttct

SEQ ID NO: 3945 - DNA, 75 bp, synthetic construct
  misc_feature 1..75: note = Synthetic construct
  source 1..75: mol_type = other DNA
cagctgcagttggtggagtctgggggaggcgtggtccagcctgggaagtcgctgaggctctcctgtgcaggctct

SEQ ID NO: 3946 - DNA, 75 bp, synthetic construct
  misc_feature 1..75: note = Synthetic construct
  source 1..75: mol_type = other DNA
gaggtccagctggtacagtccggggctgaggtgaagaagcctggggccaccgtgaaaatctcctgtaaggcttct

SEQ ID NO: 3947 - DNA, 75 bp, synthetic construct
  misc_feature 1..75: note = Synthetic construct
  source 1..75: mol_type = other DNA
caggtccagctggtgcagtctggggctgaggtgaagaagcctgggtcctcggtgaaggtctcctgcaaggctcct

SEQ ID NO: 3948 - DNA, 75 bp, synthetic construct
  misc_feature 1..75: note = Synthetic construct
  source 1..75: mol_type = other DNA
caggtgcagctggtgcagtctggggctgaggtgaagaagcctggggcctcagtgaaggtttcctgcaaggcatct

SEQ ID NO: 3949 - DNA, 75 bp, synthetic construct
  misc_feature 1..75: note = Synthetic construct
  source 1..75: mol_type = other DNA
caggtgcagctggtgcagtctgggactgaggtgaagaagactggggcctcagtgaaaatctcctgcaaggcctct

SEQ ID NO: 3950 - DNA, 75 bp, synthetic construct
  misc_feature 1..75: note = Synthetic construct
  source 1..75: mol_type = other DNA
caggtgcagctggtgcaatctggggctgaggtgaagaagcctggggcctcagtgaaggtctcctgtaaggcttct

SEQ ID NO: 3951 - DNA, 75 bp, synthetic construct
  misc_feature 1..75: note = Synthetic construct
  source 1..75: mol_type = other DNA
caggtccttctggtacaatctggggctgaggtgaagaagcctggggcctcagtgaaggtctcctgcaaggtttcc

SEQ ID NO: 3952 - DNA, 75 bp, synthetic construct
  misc_feature 1..75: note = Synthetic construct
  source 1..75: mol_type = other DNA
caggtccaattggtacagcctggggctgaggtgaagaagcctggggcctcagtgaaggtctcctgcaaagtttcc

SEQ ID NO: 3953 - DNA, 75 bp, synthetic construct
  misc_feature 1..75: note = Synthetic construct
  source 1..75: mol_type = other DNA
caggtgcagctggtgcagtctggggctgaggtgaagaagcctggggcctcagtgaaggtctcctgtacggcctct

SEQ ID NO: 3954 - DNA, 75 bp, synthetic construct
  misc_feature 1..75: note = Synthetic construct
  source 1..75: mol_type = other DNA
caggtgcacctggtgcagtctggggctgagttgaagaagcctggggcctcgctgaggatttcctgcaaggcaagt

SEQ ID NO: 3955 - DNA, 75 bp, synthetic construct
  misc_feature 1..75: note = Synthetic construct
  source 1..75: mol_type = other DNA
cagtcccttctgacgcagtctggggccgagttgaagaagcctgggtcctctgtgagggtctcctgtcaggcttct

SEQ ID NO: 3956 - DNA, 75 bp, synthetic construct
  misc_feature 1..75: note = Synthetic construct
  source 1..75: mol_type = other DNA
caggtccaacttgtgcagtctgcggctgacgtgaagaagcctggggcctcagtgaaggtttcctgcaaggcttct

SEQ ID NO: 3957 - DNA, 75 bp, synthetic construct
  misc_feature 1..75: note = Synthetic construct
  source 1..75: mol_type = other DNA
gaggtgcagctggtgcagtctggagcagaggtgaaaaagccgggggagtctctgaagatctcctgtaagggttct

SEQ ID NO: 3958 - DNA, 75 bp, synthetic construct
  misc_feature 1..75: note = Synthetic construct
  source 1..75: mol_type = other DNA
gaggtgcagctggtgcagtctggagcagaggtgaaaaagccgggggagtctctgaagatctcctgtcagggttct

SEQ ID NO: 3959 - DNA, 75 bp, synthetic construct
  misc_feature 1..75: note = Synthetic construct
  source 1..75: mol_type = other DNA
gaggtgcagctggtgcagtctggagcagaggtgaaaaagcccggacagtctctgacaatctcctgtaaggcttct

SEQ ID NO: 3960 - DNA, 75 bp, synthetic construct
  misc_feature 1..75: note = Synthetic construct
  source 1..75: mol_type = other DNA
gaggtgcagctggtgcagtctggagcagaggtgagaaagccgggggagtttctggagatctcctgtaaggattct

SEQ ID NO: 3961 - DNA, 75 bp, synthetic construct
  misc_feature 1..75: note = Synthetic construct
  source 1..75: mol_type = other DNA
gaggtgcgactggtgcagtctggagcagaggtgaaaaagccgggggaatctctgaagatctcctgtaagggctct

SEQ ID NO: 3962 - DNA, 75 bp, synthetic construct
  misc_feature 1..75: note = Synthetic construct
  source 1..75: mol_type = other DNA
gaggcgcagctggtgcagtctggagcagaggtgaaaaagccgggggagtctctgaggatctcctgtaaggcttct

SEQ ID NO: 3963 - DNA, 75 bp, synthetic construct
  misc_feature 1..75: note = Synthetic construct
  source 1..75: mol_type = other DNA
gaggtgcagctggtgcagtctggagcagaggtgaaaaagccgggggagtctctgaagatctcctgtaaggcttct

SEQ ID NO: 3964 - DNA, 75 bp, synthetic construct
  misc_feature 1..75: note = Synthetic construct
  source 1..75: mol_type = other DNA
gaggtgcagctggtgcagtctggagcagaggtgaaaaagccgggggagtctctgaagatctcctgtcaggtttct

SEQ ID NO: 3965 - DNA, 75 bp, synthetic construct
  misc_feature 1..75: note = Synthetic construct
  source 1..75: mol_type = other DNA
ggggtgcacctggagcagtctggagcagaggtgaaaaagccgggggagtctctgaagatctcctgtaagggttct

SEQ ID NO: 3966 - DNA, 75 bp, synthetic construct
  misc_feature 1..75: note = Synthetic construct
  source 1..75: mol_type = other DNA
gaagttcaactggaacagtctggagcggaggtgaagaagccgggggagtctctgaagatcgcctgcaagtgttct

SEQ ID NO: 3967 - DNA, 75 bp, synthetic construct
  misc_feature 1..75: note = Synthetic construct
  source 1..75: mol_type = other DNA
gaggtgcagctggtgcagtctggagcagaggtgaaaaagtcgggggagtctctgaagatctcctgtaagggttct

SEQ ID NO: 3968 - DNA, 75 bp, synthetic construct
  misc_feature 1..75: note = Synthetic construct
  source 1..75: mol_type = other DNA
gaggtgcagctggtgcagtctggagcagaggtcaaaaagccgggggagtctctgaagatctcctgtaagggttct

SEQ ID NO: 3969 - DNA, 75 bp, synthetic construct
  misc_feature 1..75: note = Synthetic construct
  source 1..75: mol_type = other DNA
gaggagcagctggtgcagtctggagcagaggcgagaaagccgggggagtctctgaagatctcctgtaagggttct

SEQ ID NO: 3970 - DNA, 75 bp, synthetic construct
  misc_feature 1..75: note = Synthetic construct
  source 1..75: mol_type = other DNA
gaggtgcacctggtgcagtctggagcagaggtgaaaaagccgggggagtctctaaagatctcctgtcagggttct

SEQ ID NO: 3971 - DNA, 75 bp, synthetic construct
  misc_feature 1..75: note = Synthetic construct
  source 1..75: mol_type = other DNA
gaggtgcagctggtgcagtctgaagcagaggtgaaaaagccgggggagtctctgaagatctcctgtaaggcttct

SEQ ID NO: 3972 - DNA, 75 bp, synthetic construct
  misc_feature 1..75: note = Synthetic construct
  source 1..75: mol_type = other DNA
gaggtgcagctggtgcagtctggaccagaggtgaaaaagccgggggagtctctgaagatctcctgtaagggttct

SEQ ID NO: 3973 - DNA, 75 bp, synthetic construct
  misc_feature 1..75: note = Synthetic construct
  source 1..75: mol_type = other DNA
gaggtgcagctggtgcagtctggagcagaggtgaaaaagccgggggagtctctgaagatctcctgtaaggtctct

SEQ ID NO: 3974 - DNA, 75 bp, synthetic construct
  misc_feature 1..75: note = Synthetic construct
  source 1..75: mol_type = other DNA
gaggtgcagttggtgcagtctggggctgaggtgaaaaggccgggggagtctctgaagatctcctgtcagggttct

SEQ ID NO: 3975 - DNA, 75 bp, synthetic construct
  misc_feature 1..75: note = Synthetic construct
  source 1..75: mol_type = other DNA
gaggtgcagctggcgcagtctggggcagaggtgaaaaagccgggggaatctctgaagatctcctgtcaggcttct

SEQ ID NO: 3976 - DNA, 75 bp, synthetic construct
  misc_feature 1..75: note = Synthetic construct
  source 1..75: mol_type = other DNA
gaggtgcagctggtgcagtctggagcagaggtgaaaaagccgggggagtctctgaacatttcctgtaagggttct

SEQ ID NO: 3977 - DNA, 75 bp, synthetic construct
  misc_feature 1..75: note = Synthetic construct
  source 1..75: mol_type = other DNA
gaggtgcagctggtgcagtctggagcagaagtgaaaaagccgggggagtctctgaagatctcctgcaagggttct

SEQ ID NO: 3978 - DNA, 75 bp, synthetic construct
  misc_feature 1..75: note = Synthetic construct
  source 1..75: mol_type = other DNA
caggtccaacttgtgcagtctggggctgaggtgaagaagcctggggcctcagtaaagatatcctgcaaggcttct

SEQ ID NO: 3979 - DNA, 75 bp, synthetic construct
  misc_feature 1..75: note = Synthetic construct
  source 1..75: mol_type = other DNA
caggtccagctgctgcagtctggggctgaggtgaagaagcctgggtcctcggtgaaggtgtcctgcaagacctct

SEQ ID NO: 3980 - DNA, 75 bp, synthetic construct
  misc_feature 1..75: note = Synthetic construct
  source 1..75: mol_type = other DNA
gaggtgcagctggtggagtccgggggaggcttggtacagcctggggggtccctgagactctcctgtgcagcctct

SEQ ID NO: 3981 - DNA, 75 bp, synthetic construct
  misc_feature 1..75: note = Synthetic construct
  source 1..75: mol_type = other DNA
gaggtgcagttgttggagtctgggggagacttggtacagcctggggggtccctgagactctcctgtgcagcctct

SEQ ID NO: 3982 - DNA, 75 bp, synthetic construct
  misc_feature 1..75: note = Synthetic construct
  source 1..75: mol_type = other DNA
gaggtgcagctggtggagtctgggggagacatggtacatcctggagggtccgtgagactctcctgtgtaggttct

SEQ ID NO: 3983 - DNA, 75 bp, synthetic construct
  misc_feature 1..75: note = Synthetic construct
  source 1..75: mol_type = other DNA
gaggtgcagctggtggagtctgggggaggcttggtaaagcctggggggtcccttaaaatctcctgtgcagcctct

SEQ ID NO: 3984 - DNA, 75 bp, synthetic construct
  misc_feature 1..75: note = Synthetic construct
  source 1..75: mol_type = other DNA
gaggcgaacctggtggcgtcggggggagggttggtacagcctggagggtccctgagactctcctgtgcagcctct

SEQ ID NO: 3985 - DNA, 75 bp, synthetic construct
  misc_feature 1..75: note = Synthetic construct
  source 1..75: mol_type = other DNA
gaggtgcagctggtggagtctgggggaggcctggtcaagccgggggggtccctgagactctcctgttcagcctct

SEQ ID NO: 3986 - DNA, 75 bp, synthetic construct
  misc_feature 1..75: note = Synthetic construct
  source 1..75: mol_type = other DNA
gaggtgcagctggtggagtctgggggaggcttggtacagcctggggggtccctgagactctcctgtgcagcctct

SEQ ID NO: 3987 - DNA, 75 bp, synthetic construct
  misc_feature 1..75: note = Synthetic construct
  source 1..75: mol_type = other DNA
gaggtgcagctggtggactctgggggaggcttggtacagcctggagggtccctgagactcacctgtgcagcctct

SEQ ID NO: 3988 - DNA, 75 bp, synthetic construct
  misc_feature 1..75: note = Synthetic construct
  source 1..75: mol_type = other DNA
gaggtgcagttgttggagtctgggggaggcttggtacagcctggggggtccctgagactctcctgtgcagcctct

SEQ ID NO: 3989 - DNA, 75 bp, synthetic construct
  misc_feature 1..75: note = Synthetic construct
  source 1..75: mol_type = other DNA
gaagtgcagctgttggagtctgggggaggcttggtacagcccggggggtccctgagactctcctgtgcagcctct

SEQ ID NO: 3990 - DNA, 75 bp, synthetic construct
  misc_feature 1..75: note = Synthetic construct
  source 1..75: mol_type = other DNA
gaggtacagctgttggagtctgggggaggcttggtacagcctggggggtccctgagactctcctgtgcagcctct

SEQ ID NO: 3991 - DNA, 75 bp, synthetic construct
  misc_feature 1..75: note = Synthetic construct
  source 1..75: mol_type = other DNA
gaggtgcagctggtggagtctgggggaggcttggtacagcctggagggttcctgagactctcctgtgcagcctct

SEQ ID NO: 3992 - DNA, 75 bp, synthetic construct
  misc_feature 1..75: note = Synthetic construct
  source 1..75: mol_type = other DNA
gcggtgcagttggtggagtctgggggaagcctggtcaagcctggggggtccctgagactctcctgtgcagcctct

SEQ ID NO: 3993 - DNA, 75 bp, synthetic construct
  misc_feature 1..75: note = Synthetic construct
  source 1..75: mol_type = other DNA
gaggtgcaactggtggagtctgggggaggcctggtcaagcctggggggtccctgagactctcctgtgcagcctct

SEQ ID NO: 3994 - DNA, 75 bp, synthetic construct
  misc_feature 1..75: note = Synthetic construct
  source 1..75: mol_type = other DNA
gaggtgcaactggtggagtctgggggaggcctggtcaagcctggggggtccctgagactctcctgtgcagtctct

SEQ ID NO: 3995 - DNA, 75 bp, synthetic construct
  misc_feature 1..75: note = Synthetic construct
  source 1..75: mol_type = other DNA
gaggtgcagctggtggagtctgggggaggcccggtcaagcctggggggtccctgagactctcctgtgcagcctct

SEQ ID NO: 3996 - DNA, 75 bp, synthetic construct
  misc_feature 1..75: note = Synthetic construct
  source 1..75: mol_type = other DNA
gaggtgcagctggtggagtctgggggaggcctggtcaagccgggggggtccctgagactctcctgtgcaggctct

SEQ ID NO: 3997 - DNA, 75 bp, synthetic construct
  misc_feature 1..75: note = Synthetic construct
  source 1..75: mol_type = other DNA
gaggtgcagctggtggagtctgggggaggcctggtcaagcctggggggtccctgagactctcctgtacagcctct

SEQ ID NO: 3998 - DNA, 75 bp, synthetic construct
  misc_feature 1..75: note = Synthetic construct
  source 1..75: mol_type = other DNA
gaggtgcagctggtggagtctgggggaggcctggtcaagcctggggggtccctgagactctcctgtgcagcctct

SEQ ID NO: 3999 - DNA, 75 bp, synthetic construct
  misc_feature 1..75: note = Synthetic construct
  source 1..75: mol_type = other DNA
gaggtccaactggtgcagtcggggggaggcctggtcaagccgggggggtccctgagactctcctgtgcagcctca

SEQ ID NO: 4000 - DNA, 75 bp, synthetic construct
  misc_feature 1..75: note = Synthetic construct
  source 1..75: mol_type = other DNA
gaattgcagctggtggagtctgggggaggcttggtacagcctggagggtccctgagactctcctgtgcggcctct

SEQ ID NO: 4001 - DNA, 75 bp, synthetic construct
  misc_feature 1..75: note = Synthetic construct
  source 1..75: mol_type = other DNA
gacgtgcagctggtggagtctgggggaggcttggtacagcctggagggtccctgagactctcctgtgcagcctct

SEQ ID NO: 4002 - DNA, 75 bp, synthetic construct
  misc_feature 1..75: note = Synthetic construct
  source 1..75: mol_type = other DNA
gaggaacaattgatggagtctgggggaggcttggtacagcctggagggtccctgagactctcctgtgtagcctct

SEQ ID NO: 4003 - DNA, 75 bp, synthetic construct
  misc_feature 1..75: note = Synthetic construct
  source 1..75: mol_type = other DNA
gaggtgcagctggcggagtctgggggaggcttggtacagcctggagggtccctgagactctcctgtgcagcctct

SEQ ID NO: 4004 - DNA, 75 bp, synthetic construct
  misc_feature 1..75: note = Synthetic construct
  source 1..75: mol_type = other DNA
gaggtgcagctggtggagtctgggggaggcctggtacagcctggagggtccctgagactctcctgtgcagcctct

SEQ ID NO: 4005 - DNA, 75 bp, synthetic construct
  misc_feature 1..75: note = Synthetic construct
  source 1..75: mol_type = other DNA
gaggtgcagctggtggagtctgggggaggcttggtacagcctggagggtccctgagactctcctgcgcaacgtct

SEQ ID NO: 4006 - DNA, 75 bp, synthetic construct
  misc_feature 1..75: note = Synthetic construct
  source 1..75: mol_type = other DNA
gaggtgcagctggtggagtctgggggaggcttggtacagcctggagggtccctgagactctcctgtgcagcctct

SEQ ID NO: 4007 - DNA, 75 bp, synthetic construct
  misc_feature 1..75: note = Synthetic construct
  source 1..75: mol_type = other DNA
gacgtgcaattggtggaatctgggggaggcctggtcaagccgggggggtccctgagactctcctgtgttgcctct

SEQ ID NO: 4008 - DNA, 61 bp, synthetic construct
  misc_feature 1..61: note = Synthetic construct
  source 1..61: mol_type = other DNA
ggggtctgggggagccttggtacagcctggagggtccctgcgactctcctgtttaggatct

SEQ ID NO: 4009 - DNA, 75 bp, synthetic construct
  misc_feature 1..75: note = Synthetic construct
  source 1..75: mol_type = other DNA
gaggtgcagctggaggagtctgggggaggcttggtacagcctggagggtcccggagactctcctgtgcagcctct

SEQ ID NO: 4010 - DNA, 75 bp, synthetic construct
  misc_feature 1..75: note = Synthetic construct
  source 1..75: mol_type = other DNA
gaggtgcagctggtggagtctgggggaggcttggtacagcctggagggtccctgagactctcctgtgccgcctct

SEQ ID NO: 4011 - DNA, 75 bp, synthetic construct
  misc_feature 1..75: note = Synthetic construct
  source 1..75: mol_type = other DNA
gaggtgcagctggtggagtctggggggggcttggtaaagcctggagggtccctgagactctcctgtacaggctct

SEQ ID NO: 4012 - DNA, 75 bp, synthetic construct
  misc_feature 1..75: note = Synthetic construct
  source 1..75: mol_type = other DNA
gaggtgcagttggtggagtctgggggaggcttggtacagcctggagggtccctgagactctcctgcacagcccct

SEQ ID NO: 4013 - DNA, 75 bp, synthetic construct
  misc_feature 1..75: note = Synthetic construct
  source 1..75: mol_type = other DNA
gaggtgcagctggtggagtccgggggcggcctggtcaagcctggggggtccctgagactctcctgtgtagcctct

SEQ ID NO: 4014 - DNA, 75 bp, synthetic construct
  misc_feature 1..75: note = Synthetic construct
  source 1..75: mol_type = other DNA
gaggtgcaactggtggagtctgggggcggcctggtcaagcctggggggtccctgagactctcctgtgcaggctct

SEQ ID NO: 4015 - DNA, 75 bp, synthetic construct
  misc_feature 1..75: note = Synthetic construct
  source 1..75: mol_type = other DNA
caggtccacctggtggagtctgggggaggcttggtcaagcctggagggtccctgagactctcctgtgcagcctct

SEQ ID NO: 4016 - DNA, 75 bp, synthetic construct
  misc_feature 1..75: note = Synthetic construct
  source 1..75: mol_type = other DNA
gaggtgcagctggtggagtctgggggaggcttggtcaagcctggagggtccctgagactctcttgtgcagtttct

SEQ ID NO: 4017 - DNA, 75 bp, synthetic construct
  misc_feature 1..75: note = Synthetic construct
  source 1..75: mol_type = other DNA
gaggtgcgattggaggagtctgggggaggccacattgagccgggggggtccctgagactctcgtgttcagcctct

SEQ ID NO: 4018 - DNA, 75 bp, synthetic construct
  misc_feature 1..75: note = Synthetic construct
  source 1..75: mol_type = other DNA
gacgtgcaactggtggagtctgggggaggcttggtacagcctggagggtccctgagactctcctgtgcagtctct

SEQ ID NO: 4019 - DNA, 75 bp, synthetic construct
  misc_feature 1..75: note = Synthetic construct
  source 1..75: mol_type = other DNA
gaggtgcaactggtggagtctgggggaggcttggtgcagcctggcgggtccctgagactctcctgtacagcctct

SEQ ID NO: 4020 - DNA, 75 bp, synthetic construct
  misc_feature 1..75: note = Synthetic construct
  source 1..75: mol_type = other DNA
gaggtgcagttggtggagtctgggggagccttggtccagcctggagagtccctcagactctcttgtgaagcctct

SEQ ID NO: 4021 - DNA, 75 bp, synthetic construct
  misc_feature 1..75: note = Synthetic construct
  source 1..75: mol_type = other DNA
gaggtgcagctggtggagtctgggggaggcttggtgaagcctggggggtcccttagactctcctgtgcagcctct

SEQ ID NO: 4022 - DNA, 75 bp, synthetic construct
  misc_feature 1..75: note = Synthetic construct
  source 1..75: mol_type = other DNA
gcggttcaactggtggaatctgggggaggcctggttcagcctggagggtccctgagactctcctgtgcagcctct

SEQ ID NO: 4023 - DNA, 75 bp, synthetic construct
  misc_feature 1..75: note = Synthetic construct
  source 1..75: mol_type = other DNA
gaggtgcagctggtggagtctgggggaggcctggtcaagcctggggggtccctgagagtctcctgtgcagcctct

SEQ ID NO: 4024 - DNA, 75 bp, synthetic construct
  misc_feature 1..75: note = Synthetic construct
  source 1..75: mol_type = other DNA
caggtgcagctggtgcaatctgggtctgagttgaagaagcctggggcctcagtgaaggtttcctgcaaggcttct

SEQ ID NO: 4025 - DNA, 75 bp, synthetic construct
  misc_feature 1..75: note = Synthetic construct
  source 1..75: mol_type = other DNA
caggtgcggttggagcagtctggatctgagttgaagaagcctgggacctcagtgaaggtttcctgcaaggcttct

SEQ ID NO: 4026 - DNA, 75 bp, synthetic construct
  misc_feature 1..75: note = Synthetic construct
  source 1..75: mol_type = other DNA
gaggtgcaactggtggagtctgggggaagtgtggtacggcctggggggtccctcagactctcctgtacagcctct

SEQ ID NO: 4027 - DNA, 75 bp, synthetic construct
  misc_feature 1..75: note = Synthetic construct
  source 1..75: mol_type = other DNA
ggggtgcaattggtggagtctgggggaggtgtgatacggccgggggggtccctgagactctcctgtgcagcctcc

SEQ ID NO: 4028 - DNA, 75 bp, synthetic construct
  misc_feature 1..75: note = Synthetic construct
  source 1..75: mol_type = other DNA
gaggtgcagctggtggaatctgggggaggcttggtgcagcctggggggtccctgagactctcctgtgcagcctct

SEQ ID NO: 4029 - DNA, 75 bp, synthetic construct
  misc_feature 1..75: note = Synthetic construct
  source 1..75: mol_type = other DNA
gaggtgcagctgttggagtctgggggaggcttggtacagcccggggggtccctgagactctcctgtgcagtctct

SEQ ID NO: 4030 - DNA, 75 bp, synthetic construct
  misc_feature 1..75: note = Synthetic construct
  source 1..75: mol_type = other DNA
gaggtgcaactggtggagtctgggggaggcttggttcagccagggcggtcccttagactctcctgtacagcttct

SEQ ID NO: 4031 - DNA, 75 bp, synthetic construct
  misc_feature 1..75: note = Synthetic construct
  source 1..75: mol_type = other DNA
gaggtgcagttgttggagtctgggggaggcttggtgcagcctggggggtccctgagactctcgtgtgcagactct

SEQ ID NO: 4032 - DNA, 75 bp, synthetic construct
  misc_feature 1..75: note = Synthetic construct
  source 1..75: mol_type = other DNA
gaggtgcagttgttggagtctgggggaggcttcgtacactctggggggtccctgagactctcctgtgcagcctct

SEQ ID NO: 4033 - DNA, 75 bp, synthetic construct
  misc_feature 1..75: note = Synthetic construct
  source 1..75: mol_type = other DNA
gaggtgcagctggtggagtctgggggaggcttggtccagcctggggggtccctgagactctcctgtgtagcctct

SEQ ID NO: 4034 - DNA, 75 bp, synthetic construct
  misc_feature 1..75: note = Synthetic construct
  source 1..75: mol_type = other DNA
gaggtgcagctgttggagtctgggggaggcatggtacagcctggggggtcccggagactctcctgtgcagcctct

SEQ ID NO: 4035 - DNA, 75 bp, synthetic construct
  misc_feature 1..75: note = Synthetic construct
  source 1..75: mol_type = other DNA
gaggtgcagttgttggagtctgggggaggcttggtacagccgggggggtccctaagactctcctgttcaatgtct

SEQ ID NO: 4036 - DNA, 75 bp, synthetic construct
  misc_feature 1..75: note = Synthetic construct
  source 1..75: mol_type = other DNA
gaggtgcaactggcggagtctggggggcgcttagtccgcccgggggagtccctgagactctcctgtgcagcctct

SEQ ID NO: 4037 - DNA, 75 bp, synthetic construct
  misc_feature 1..75: note = Synthetic construct
  source 1..75: mol_type = other DNA
gaggtgcagctggtggagtctgggggaggcttggtacaccctggggggtccctgagactctcctgtgcagcctct

SEQ ID NO: 4038 - DNA, 75 bp, synthetic construct
  misc_feature 1..75: note = Synthetic construct
  source 1..75: mol_type = other DNA
gaggtgcagctggtggagtctgggggaggcttggtccagcctggggggtccctgagactctcctgtgcagcctcc

SEQ ID NO: 4039 - DNA, 75 bp, synthetic construct
  misc_feature 1..75: note = Synthetic construct
  source 1..75: mol_type = other DNA
gaggtgcagctggtggagtctgggggaggcttggtccagcctggggggtccctgagactctcctgtgcagcctcg

SEQ ID NO: 4040 - DNA, 75 bp, synthetic construct
  misc_feature 1..75: note = Synthetic construct
  source 1..75: mol_type = other DNA
gaggtgcagctggtggagtctgggggaggcttggtccagcttggggggtctctgagactctcctgtgcagcctct

SEQ ID NO: 4041 - DNA, 75 bp, synthetic construct
  misc_feature 1..75: note = Synthetic construct
  source 1..75: mol_type = other DNA
gaggtgcagctggtggagtctgggggaggcttcatacagcctggagggtccctgagactctcctgtgcagcctct

SEQ ID NO: 4042 - DNA, 75 bp, synthetic construct
  misc_feature 1..75: note = Synthetic construct
  source 1..75: mol_type = other DNA
gaggtgcacctggtggaatcggggggagccgtggtacagccagggcggtccctgagactctcctgtacaggcact

SEQ ID NO: 4043 - DNA, 75 bp, synthetic construct
  misc_feature 1..75: note = Synthetic construct
  source 1..75: mol_type = other DNA
gaggtgcagttgttggagtctgggggagacttggtacaccccggggggtccctgagactctcctgtgcagcctct

SEQ ID NO: 4044 - DNA, 75 bp, synthetic construct
  misc_feature 1..75: note = Synthetic construct
  source 1..75: mol_type = other DNA
gaagtgaaactggtagaatctgggggaggcttggtccagccgggggggtccctgagactctcctgtgaagcctct

SEQ ID NO: 4045 - DNA, 75 bp, synthetic construct
  misc_feature 1..75: note = Synthetic construct
  source 1..75: mol_type = other DNA
gaggtgcagctggtggaatctgggggaggcttggtacagccagggcggtccctgagactctcctgtaaagcctct

SEQ ID NO: 4046 - DNA, 75 bp, synthetic construct
  misc_feature 1..75: note = Synthetic construct
  source 1..75: mol_type = other DNA
gaagggcagctggtggagtctgggggaggcctcgtccaggcgggggggtccctgagaatttcctgtgcggcctct

SEQ ID NO: 4047 - DNA, 75 bp, synthetic construct
  misc_feature 1..75: note = Synthetic construct
  source 1..75: mol_type = other DNA
caggtgcagctggtggagtctgggggaggcttggtcaagcctggagggtccctaagactctcctgtgcagtctct

SEQ ID NO: 4048 - DNA, 75 bp, synthetic construct
  misc_feature 1..75: note = Synthetic construct
  source 1..75: mol_type = other DNA
caggtgcgactggtggagtctgggggaggcttggtcgagcctggagggtccctgagactctcctgtgcagcctct

SEQ ID NO: 4049 - DNA, 75 bp, synthetic construct
  misc_feature 1..75: note = Synthetic construct
  source 1..75: mol_type = other DNA
gaagggcagttgtcggagtccgggggaggcttggttcagccgggggggtccctgagactctcctgtgcagcctct

SEQ ID NO: 4050 - DNA, 75 bp, synthetic construct
  misc_feature 1..75: note = Synthetic construct
  source 1..75: mol_type = other DNA
gaggtgcaactgttggagtctgggggaggcttggtacagcctggggggtccctgagaatctcctgtgcagcctct

SEQ ID NO: 4051 - DNA, 75 bp, synthetic construct
  misc_feature 1..75: note = Synthetic construct
  source 1..75: mol_type = other DNA
caggtgcagctggtggagtctgggggaggcttggtcaagcctggagggtccctgagactctcctgtgcagcctct

SEQ ID NO: 4052 - DNA, 75 bp, synthetic construct
  misc_feature 1..75: note = Synthetic construct
  source 1..75: mol_type = other DNA
caggtgcaactggtggagtctgggggaggcttggtcaagcctggagggtccctgagactctcctgtgtaggctct

SEQ ID NO: 4053 - DNA, 75 bp, synthetic construct
  misc_feature 1..75: note = Synthetic construct
  source 1..75: mol_type = other DNA
caggtgcaactggtggagtctgggggaggcttggtcaagcctggagggtccctgagactctcctgtgcagcctct

SEQ ID NO: 4054 - DNA, 75 bp, synthetic construct
  misc_feature 1..75: note = Synthetic construct
  source 1..75: mol_type = other DNA
gaggtgcagttggtggagtctgggggaagtgtggtacggccgggggggtccctgagactctcctgtgcagccgct

SEQ ID NO: 4055 - DNA, 75 bp, synthetic construct
  misc_feature 1..75: note = Synthetic construct
  source 1..75: mol_type = other DNA
gacgctcaagttttggagtctgggggaggcttggtgcagcctggggggtccctgagactctcctgtgtcgcctct

SEQ ID NO: 4056 - DNA, 75 bp, synthetic construct
  misc_feature 1..75: note = Synthetic construct
  source 1..75: mol_type = other DNA
gaggtgcagctggtggagtctgggggaggcttggtacagcctggggggaccctgagactctcctgtgcagcctct

SEQ ID NO: 4057 - DNA, 75 bp, synthetic construct
  misc_feature 1..75: note = Synthetic construct
  source 1..75: mol_type = other DNA
gaggtgcagctgttggagtctgggggaggcttggtacagcctggggggtccctgagactctcctgtgtagcctct

SEQ ID NO: 4058 - DNA, 75 bp, synthetic construct
  misc_feature 1..75: note = Synthetic construct
  source 1..75: mol_type = other DNA
gaggtgcagctggaggagtctgggggaggcttggtccagcctggggggtccctgagactctcctgtgcagcctct

SEQ ID NO: 4059 - DNA, 75 bp, synthetic construct
  misc_feature 1..75: note = Synthetic construct
  source 1..75: mol_type = other DNA
gaggtgcagctggtggagtctgggggaggcttgataaagcctggggggtccctgagactctcctgcgtagcctct

SEQ ID NO: 4060 - DNA, 75 bp, synthetic construct
  misc_feature 1..75: note = Synthetic construct
  source 1..75: mol_type = other DNA
gaggtgcagctggtggagtctgggggaggcttggtacagccagggcggtccctgagactctcctgtacagcttct

SEQ ID NO: 4061 - DNA, 75 bp, synthetic construct
  misc_feature 1..75: note = Synthetic construct
  source 1..75: mol_type = other DNA
gaggtgaaactggaggagtccggaggaggcctggtccagccgggggggtcccaaagactctcctgtgcagcctct

SEQ ID NO: 4062 - DNA, 75 bp, synthetic construct
  misc_feature 1..75: note = Synthetic construct
  source 1..75: mol_type = other DNA
gaggtgcaactggtggagtctggaggaggcttggtccagcctggggggtccctgagactctcctgtgcagcctct

SEQ ID NO: 4063 - DNA, 75 bp, synthetic construct
  misc_feature 1..75: note = Synthetic construct
  source 1..75: mol_type = other DNA
gaggtgcagctagtggagtctgggggaggcttggtacagccgggggggtccctgagactctcctgtgcagcctct

SEQ ID NO: 4064 - DNA, 75 bp, synthetic construct
  misc_feature 1..75: note = Synthetic construct
  source 1..75: mol_type = other DNA
gaggtgcaactggtggagtctgggggaaccttggtacagcctggggggtccctgagactctcctgtgcagcctct

SEQ ID NO: 4065 - DNA, 75 bp, synthetic construct
  misc_feature 1..75: note = Synthetic construct
  source 1..75: mol_type = other DNA
gaggtgcagctgttggagtctgggggaggcttggttcagcctggggagtccctgagaatttcctgtgcagcctct

SEQ ID NO: 4066 - DNA, 75 bp, synthetic construct
  misc_feature 1..75: note = Synthetic construct
  source 1..75: mol_type = other DNA
gaggtgcaacttgtggagtctgggggaggcttggtacaaccgggggggtccctgagactctcctgtgcagcctct

SEQ ID NO: 4067 - DNA, 75 bp, synthetic construct
  misc_feature 1..75: note = Synthetic construct
  source 1..75: mol_type = other DNA
gaggtgcagctgttggagtctgggggaggcttggtacagcctggggggtccctgagactctcctgtgcagcctct

SEQ ID NO: 4068 - DNA, 75 bp, synthetic construct
  misc_feature 1..75: note = Synthetic construct
  source 1..75: mol_type = other DNA
gaggtgcagttggtggagtctgggggaggcttggtacagcctggggggtccctgagactctcctgtgcagcctct

SEQ ID NO: 4069 - DNA, 75 bp, synthetic construct
  misc_feature 1..75: note = Synthetic construct
  source 1..75: mol_type = other DNA
gaggtgcagctggtggagtctgggggaaccttggtacagcctggggggtccctgagactctcctgtgcagtctct

SEQ ID NO: 4070 - DNA, 75 bp, synthetic construct
  misc_feature 1..75: note = Synthetic construct
  source 1..75: mol_type = other DNA
gaggtgcagctggcggaatctgggggagacttcgtacagccgggggggtccctgagactctcttgtgcagcctct

SEQ ID NO: 4071 - DNA, 75 bp, synthetic construct
  misc_feature 1..75: note = Synthetic construct
  source 1..75: mol_type = other DNA
gaggtgcagctggtggagactggaggaggcttgatccagcctggggggtccctgagactctcctgtgcagcctct

SEQ ID NO: 4072 - DNA, 75 bp, synthetic construct; identical to SEQ ID NO: 1777
  misc_feature 1..75: note = Synthetic construct
  source 1..75: mol_type = other DNA

SEQ ID NO: 4073 - DNA, 75 bp, synthetic construct
  misc_feature 1..75: note = Synthetic construct
  source 1..75: mol_type = other DNA
gaggtgcagctggtggaatctgggggaggcttggtccagcctggggggtccctgagactctcctgtgcagcctct

SEQ ID NO: 4074 - DNA, 75 bp, synthetic construct
  misc_feature 1..75: note = Synthetic construct
  source 1..75: mol_type = other DNA
gaggtgcagctggtggagtctgggggaggcttggtccagcccggggggtccctgagactctcttgtgcagcctct

SEQ ID NO: 4075 - DNA, 75 bp, synthetic construct
  misc_feature 1..75: note = Synthetic construct
  source 1..75: mol_type = other DNA
gaggtgcagctggtggagtctgggggaggcttggtccagcctggggggtccctgagactctcctgtgcagcctct

SEQ ID NO: 4076 - DNA, 75 bp, synthetic construct
  misc_feature 1..75: note = Synthetic construct
  source 1..75: mol_type = other DNA
gaggtgcagctggtggagtctgggggaggcttggtccagtctggggagtccctgagagtctcctgtgcagcctct

SEQ ID NO: 4077 - DNA, 75 bp, synthetic construct
  misc_feature 1..75: note = Synthetic construct
  source 1..75: mol_type = other DNA
gagttgcgactggtggagtctgggggaggccgggtccagccgggggggtccctgagactctcctgtgcagcctct

SEQ ID NO: 4078 - DNA, 75 bp, synthetic construct
  misc_feature 1..75: note = Synthetic construct
  source 1..75: mol_type = other DNA
gaggtgcagctggtggagtctgggggaggcttggtaaagcctggggggtcccttagactctcctgtgcagcctct

SEQ ID NO: 4079 - DNA, 75 bp, synthetic construct
  misc_feature 1..75: note = Synthetic construct
  source 1..75: mol_type = other DNA
gaggtgcagctggtggagtttgggggaggcttggtaaagcctggggggtcccttagactctcctgtgcagcctct

SEQ ID NO: 4080 - DNA, 75 bp, synthetic construct
  misc_feature 1..75: note = Synthetic construct
  source 1..75: mol_type = other DNA
gaggtgcaactggtggagtctgggggaggcttggtacagccagggcggtccctgagactctcctgtacagtctct

SEQ ID NO: 4081 - DNA, 75 bp, synthetic construct
  misc_feature 1..75: note = Synthetic construct
  source 1..75: mol_type = other DNA
gaggtgcagctgttggagtctgggggaggcttggtacagccgggggggtccctgagactctcctgttcagcctct

SEQ ID NO: 4082 - DNA, 75 bp, synthetic construct
  misc_feature 1..75: note = Synthetic construct
  source 1..75: mol_type = other DNA
gaggtgcagctggtggagtctgggggaggcttggtccagcctggggggtccctgagactctcttgtgcagcctct

SEQ ID NO: 4083 - DNA, 75 bp, synthetic construct
  misc_feature 1..75: note = Synthetic construct
  source 1..75: mol_type = other DNA
gaggtgcagttggtggagtctgggggagacttggtccagcctggggggtccctgagactctcctgtgcagcctcc

SEQ ID NO: 4084 - DNA, 75 bp, synthetic construct
  misc_feature 1..75: note = Synthetic construct
  source 1..75: mol_type = other DNA
gaggtgcagttggtggagaccggaggagagttgatccagcctggggggtccctgagactctcctgtgcggcctct

SEQ ID NO: 4085 - DNA, 75 bp, synthetic construct
  misc_feature 1..75: note = Synthetic construct
  source 1..75: mol_type = other DNA
gaggtgaagttggcggagtctgggggaggcttggtccagcccggggggtccctgacactctcctgtgtagtctct

SEQ ID NO: 4086 - DNA, 75 bp, synthetic construct
  misc_feature 1..75: note = Synthetic construct
  source 1..75: mol_type = other DNA
caggtgcagctggtggaatctgggggaggcttggtcaagcctggagggtccctgagactctcctgtgcagcctct

SEQ ID NO: 4087 - DNA, 75 bp, synthetic construct
  misc_feature 1..75: note = Synthetic construct
  source 1..75: mol_type = other DNA
gaggtacaactagtggagtctgggggacgtgtggtacggccgggggagtccctgagactctcctgtgcagtctct

SEQ ID NO: 4088 - DNA, 75 bp, synthetic construct
  misc_feature 1..75: note = Synthetic construct
  source 1..75: mol_type = other DNA
ggggtgcatctggtggagtctgggggaggcttggtccagcctggggggtccctgagactctcatgtgcagcctct

SEQ ID NO: 4089 - DNA, 75 bp, synthetic construct
  misc_feature 1..75: note = Synthetic construct
  source 1..75: mol_type = other DNA
gaggtgcagttggtggagtcggggggagacttggtccaccctggagggtccctgagactctcctgtgaagcctct

SEQ ID NO: 4090 - DNA, 75 bp, synthetic construct
  misc_feature 1..75: note = Synthetic construct
  source 1..75: mol_type = other DNA
gaggtgcagctggtggaatcggggggaggcttggtacagccagggcggtccctgagactctcctgttcagcttcc

SEQ ID NO: 4091 - DNA, 75 bp, synthetic construct
  misc_feature 1..75: note = Synthetic construct
  source 1..75: mol_type = other DNA
gaggtgcagttgttggagtctgggggaggcttggtacggcctggggggtccctgagactctcctgtgcagcctct

SEQ ID NO: 4092 - DNA, 75 bp, synthetic construct
  misc_feature 1..75: note = Synthetic construct
  source 1..75: mol_type = other DNA
gaggtgcaactggtggagtctgggggaggcttggtccagcctggggggtccctgagactctcttgtgcagcctct

SEQ ID NO: 4093 - DNA, 75 bp, synthetic construct
  misc_feature 1..75: note = Synthetic construct
  source 1..75: mol_type = other DNA
gaggtgcaactggtggagtctgggggaggcttggtaaagcctggggggtcccttagactctcctgtgcagcctct

SEQ ID NO: 4094 - DNA, 75 bp, synthetic construct
  misc_feature 1..75: note = Synthetic construct
  source 1..75: mol_type = other DNA
gaggtgcaactggtggagtctgggggaggcttggtccagccgggggggtccctgagactttcctgtgcagcctct

SEQ ID NO: 4095 - DNA, 75 bp, synthetic construct
  misc_feature 1..75: note = Synthetic construct
  source 1..75: mol_type = other DNA
gaggtggaactggtggagtctgggggaggcttggtccagcctggggggtccctaagactctcctgtgaagcctct

SEQ ID NO: 4096 - DNA, 75 bp, synthetic construct
  misc_feature 1..75: note = Synthetic construct
  source 1..75: mol_type = other DNA
gaggtgaggctggtggagtctgggggaggcttggttagacctggggaatctctcagaataacatgtgcagcctct

SEQ ID NO: 4097 - DNA, 75 bp, synthetic construct
  misc_feature 1..75: note = Synthetic construct
  source 1..75: mol_type = other DNA
gaggtgatgttggtggagtctgggggaggcgtggtacagccgggggggtcattgagtcttacctgtgtggcctcc

SEQ ID NO: 4098 - DNA, 75 bp, synthetic construct
  misc_feature 1..75: note = Synthetic construct
  source 1..75: mol_type = other DNA
caggtccagttggtgcagtctggggctgaggtgaagaagcctgggtcctcggtgaaggtctcctgtaagatttct

SEQ ID NO: 4099 - DNA, 75 bp, synthetic construct
  misc_feature 1..75: note = Synthetic construct
  source 1..75: mol_type = other DNA
caggtgcagctggtggagtctgggggaggcttggtcaaacctggagggtccctgagactctcctgtgcagcctct

SEQ ID NO: 4100 - DNA, 75 bp, synthetic construct
  misc_feature 1..75: note = Synthetic construct
  source 1..75: mol_type = other DNA
gaggtgcagctggtggagtctgggggagacttggtacagcggggggggtccttgagactctcctgtgcagcctct

SEQ ID NO: 4101 - DNA, 75 bp, synthetic construct
  misc_feature 1..75: note = Synthetic construct
  source 1..75: mol_type = other DNA
gaggtgcagctggtggagtctgggggaggcttgatagagcctggagggtccctgagactctcttgtgtagcctct

SEQ ID NO: 4102 - DNA, 75 bp, synthetic construct
  misc_feature 1..75: note = Synthetic construct
  source 1..75: mol_type = other DNA
gaggtccagctgctacagtccggggctgaggtgaagaagcctggggccaccgtgaaaatctcctgcaaggcttct

SEQ ID NO: 4103 - DNA, 75 bp, synthetic construct
  misc_feature 1..75: note = Synthetic construct
  source 1..75: mol_type = other DNA
caggaacaactggtggagtctgggggaggcgtggtgcagcctgggatgtccctgagactttcctgtgcagcctct

SEQ ID NO: 4104 - DNA, 75 bp, synthetic construct
  misc_feature 1..75: note = Synthetic construct
  source 1..75: mol_type = other DNA
gaggtgcagctggtggagtccgggggaggcttagttcagcctggggggtccctgagactctcctgtgcagcctct

SEQ ID NO: 4105 - DNA, 75 bp, synthetic construct
  misc_feature 1..75: note = Synthetic construct
  source 1..75: mol_type = other DNA
gaggtgcagctggtggagtctgggggcggcctggtcaagccgggggggtcccttagactctcctgtgcagtgtca

SEQ ID NO: 4106 - DNA, 75 bp, synthetic construct
  misc_feature 1..75: note = Synthetic construct
  source 1..75: mol_type = other DNA
gaggtgaacctggtggagtctgggggaggcttggcccagccgggggggtccctgagactctcctgtgcagcctct

SEQ ID NO: 4107 - DNA, 75 bp, synthetic construct
  misc_feature 1..75: note = Synthetic construct
  source 1..75: mol_type = other DNA
caggtgcagctggtggagtcggggggaggcgtggtccagcctgggaggtccctgagactctcctgtgcagcctct

SEQ ID NO: 4108 - DNA, 75 bp, synthetic construct
  misc_feature 1..75: note = Synthetic construct
  source 1..75: mol_type = other DNA
caggtgcagctggtggagtctgggggaggcgtggtccagcctgggaggtccctgagactctcctgtgcagcctct

SEQ ID NO: 4109 - DNA, 75 bp, synthetic construct
  misc_feature 1..75: note = Synthetic construct
  source 1..75: mol_type = other DNA
caggtgaagctggtggagtctgggggaggcgtggtccagcctgggaggtccctgagactctcctgtgcagcctct

SEQ ID NO: 4110 - DNA, 75 bp, synthetic construct
  misc_feature 1..75: note = Synthetic construct
  source 1..75: mol_type = other DNA
caggtgcggatggtgcagccgggaggaggcgtggtccagcctggggggtccctgacactctcctgtgatgtctct

SEQ ID NO: 4111 - DNA, 75 bp, synthetic construct
  misc_feature 1..75: note = Synthetic construct
  source 1..75: mol_type = other DNA
caggtgcagctggtggagtctgggggaaccgtggtccagcctgggacatccctgagactctcctgtgcagcctct

SEQ ID NO: 4112 - DNA, 75 bp, synthetic construct
  misc_feature 1..75: note = Synthetic construct
  source 1..75: mol_type = other DNA
caggtgcagttggtggagtctgggggaggcgtggtccagcctgggaggtccctgcgactctcctgtgcagcgtct

SEQ ID NO: 4113 - DNA, 75 bp, synthetic construct
  misc_feature 1..75: note = Synthetic construct
  source 1..75: mol_type = other DNA
caggtgcacctggtggagtctgggggaggcgtggtccagcctgggaggtccctgagactctcctgtgcagcctcg

SEQ ID NO: 4114 - DNA, 75 bp, synthetic construct
  misc_feature 1..75: note = Synthetic construct
  source 1..75: mol_type = other DNA
caggtgcagttggtggagtctgggggaggcgtggtccagcctgggaggtccctgagactctcctgtgcagcctct

SEQ ID NO: 4115 - DNA, 75 bp, synthetic construct
  misc_feature 1..75: note = Synthetic construct
  source 1..75: mol_type = other DNA
caggtgcaactgatggagtctgggggaggcgtggtccagcctgggaggtccctgagactctcctgtgcagcctct

SEQ ID NO: 4116 - DNA, 75 bp, synthetic construct
  misc_feature 1..75: note = Synthetic construct
  source 1..75: mol_type = other DNA
caggtgcggctggtggagtctgggggaggcgtggtccagcctgggaggtccctgagactctcctgtgcagcctct

SEQ ID NO: 4117 - DNA, 75 bp, synthetic construct
  misc_feature 1..75: note = Synthetic construct
  source 1..75: mol_type = other DNA
caggtgcagttggtggagtctgggggaggcgtgctccagtctgggaggtccctgagactctcctgtgcagcctct

SEQ ID NO: 4118 - DNA, 75 bp, synthetic construct
  misc_feature 1..75: note = Synthetic construct
  source 1..75: mol_type = other DNA
caggtgcagctggtggagtctgggggaggcgtggtccagcctgaaaagtccctgagactctcgtgtgcaacgtct

SEQ ID NO: 4119 - DNA, 75 bp, synthetic construct
  misc_feature 1..75: note = Synthetic construct
  source 1..75: mol_type = other DNA
caggtgcagctggtggagtctgggggaggcgtggtccagcctgggaggtccctgagactctcctgtgcagcgtct

SEQ ID NO: 4120 - DNA, 75 bp, synthetic construct
  misc_feature 1..75: note = Synthetic construct
  source 1..75: mol_type = other DNA
ctggcgcagttggtggagtctgggggaggcgcggtcgagcctgggaagtcactaagactgtcctgtgcagcgtct

SEQ ID NO: 4121 - DNA, 75 bp, synthetic construct
  misc_feature 1..75: note = Synthetic construct
  source 1..75: mol_type = other DNA
caggtgcaactggtggagtctgggggaggcgtggtccagcctgggaggtccctgagactctcctgtgcagcctct

SEQ ID NO: 4122 - DNA, 75 bp, synthetic construct
  misc_feature 1..75: note = Synthetic construct
  source 1..75: mol_type = other DNA
caggtgcaggtggtggagtctgggggaggcgtggtccagcctggggggtccctgagactctcctgtgaagcctct

SEQ ID NO: 4123 - DNA, 75 bp, synthetic construct
  misc_feature 1..75: note = Synthetic construct
  source 1..75: mol_type = other DNA
caggtgcggcttttggagtctgggggaggcgtggtccagcctgggaagtccctgagactctcctgtgcagcctct

SEQ ID NO: 4124 - DNA, 75 bp, synthetic construct
  misc_feature 1..75: note = Synthetic construct
  source 1..75: mol_type = other DNA
cagggacaactggtggagtctgggggaggcatggtccagcctggggggtccctgagactctcctgtgcagcctct

SEQ ID NO: 4125 - DNA, 75 bp, synthetic construct
  misc_feature 1..75: note = Synthetic construct
  source 1..75: mol_type = other DNA
caggtgcagctgctcgaatctgggggagccgtggtccagcctgggaggtccctgagactctcctgtgcagccttt

SEQ ID NO: 4126 - DNA, 75 bp, synthetic construct
  misc_feature 1..75: note = Synthetic construct
  source 1..75: mol_type = other DNA
caggtgcagttggtggagtctgggggaggcgtggtccagcctgggaggtccctgaggctcccctgtgcagcctct

SEQ ID NO: 4127 - DNA, 75 bp, synthetic construct
  misc_feature 1..75: note = Synthetic construct
  source 1..75: mol_type = other DNA
caggtgcacctggtggagtccgggggaggcgtggtccagcctggggggtccctgagactctcctgtgtagcctct

SEQ ID NO: 4128 - DNA, 75 bp, synthetic construct
  misc_feature 1..75: note = Synthetic construct
  source 1..75: mol_type = other DNA
caggtgcagctggtggagtctgggggaggcgtggtccagcctgggaagtccctgagactctcctgtgcagcctct

SEQ ID NO: 4129 - DNA, 75 bp, synthetic construct
  misc_feature 1..75: note = Synthetic construct
  source 1..75: mol_type = other DNA
gaggtgcagctggtggagtccgggggaggcttggtccagcctggggggtccctgaaactctcctgtgcagcctct

SEQ ID NO: 4130 - DNA, 75 bp, synthetic construct
  misc_feature 1..75: note = Synthetic construct
  source 1..75: mol_type = other DNA
gaagtgcagctggtggagtctgggggaggcttggtacagcctggcaggtccctgagactctcctgtgcagcctct

SEQ ID NO: 4131 - DNA, 75 bp, synthetic construct
  misc_feature 1..75: note = Synthetic construct
  source 1..75: mol_type = other DNA
gaagtgcagctggtggagtctgggggaggcttggtacagcctggcaggtccctgagactctcctgtgtagcctct

SEQ ID NO: 4132 - DNA, 75 bp, synthetic construct
  misc_feature 1..75: note = Synthetic construct
  source 1..75: mol_type = other DNA
gaagtgcagctggtggagtctgggggaggctgggtacagcctggcaggtccctgagactctcctgtgcagcctct

SEQ ID NO: 4133 - DNA, 75 bp, synthetic construct
  misc_feature 1..75: note = Synthetic construct
  source 1..75: mol_type = other DNA
gaagtgcagctggtggagtctgggggaggcttggtacatcctggcaggtccctgagactctcctgtgcagcctct

SEQ ID NO: 4134 - DNA, 75 bp, synthetic construct
  misc_feature 1..75: note = Synthetic construct
  source 1..75: mol_type = other DNA
gaggtgcacctggtggagtctgggggagtcgtggttcagcctggggggttcctgagactctcctgtgcagcctcg

SEQ ID NO: 4135 - DNA, 75 bp, synthetic construct
  misc_feature 1..75: note = Synthetic construct
  source 1..75: mol_type = other DNA
gaagtgcagctggtggagtctgggggagtcgtggtacaccctggggggtccctgagactctcctgtgtagcctct

SEQ ID NO: 4136 - DNA, 75 bp, synthetic construct
  misc_feature 1..75: note = Synthetic construct
  source 1..75: mol_type = other DNA
gaggtgcagctggtggaatctgggggaatcgtggtacagccgggggggtccctgacactctcctgtgcagcctct

SEQ ID NO: 4137 - DNA, 75 bp, synthetic construct
  misc_feature 1..75: note = Synthetic construct
  source 1..75: mol_type = other DNA
gaggtccagctggtacagtccggggctgaggtgaagaagcctggggccaccgtgaaaatctcctgcaaggcttct

SEQ ID NO: 4138 - DNA, 75 bp, synthetic construct
  misc_feature 1..75: note = Synthetic construct
  source 1..75: mol_type = other DNA
gaggtccagctgttacagtccgagactgaggtgaagaagtctggggccaccgtaaaaatctcctgcaaggcttct

SEQ ID NO: 4139 - DNA, 75 bp, synthetic construct
  misc_feature 1..75: note = Synthetic construct
  source 1..75: mol_type = other DNA
gaggtccacttgctccagtccggggctgaggtgaagaagcctggggccaccgtgaaaatctcctgcagggcttcc

SEQ ID NO: 4140 - DNA, 75 bp, synthetic construct
  misc_feature 1..75: note = Synthetic construct
  source 1..75: mol_type = other DNA
caggtgcagctggtgcagtctggggctgaggtgaagaagcctggggcctcagtgaaggtttcctgcgaggcatct

SEQ ID NO: 4141 - DNA, 75 bp, synthetic construct
  misc_feature 1..75: note = Synthetic construct
  source 1..75: mol_type = other DNA
caggtgcagctgctgcagtctggggctgaggtgaaggagcctggggcctcagtgaaagtctcctgcaaggcatct

SEQ ID NO: 4142 - DNA, 75 bp, synthetic construct
  misc_feature 1..75: note = Synthetic construct
  source 1..75: mol_type = other DNA
caggtgcaactggtgcagtctggggctgaggtgaggaagcctggggcctcagtgaaagtttcctgcaaggcgtct

SEQ ID NO: 4143 - DNA, 75 bp, synthetic construct
  misc_feature 1..75: note = Synthetic construct
  source 1..75: mol_type = other DNA
caggtgcaggtggtgcagtctggggctgaggtgaagaagcctggggcctcagtgaaggtttcctgcaaggcatct

SEQ ID NO: 4144 - DNA, 75 bp, synthetic construct
  misc_feature 1..75: note = Synthetic construct
  source 1..75: mol_type = other DNA
caggtgcagctggtgcagtctggggccgaggtgaagaaccctggggcctcagtgaaggtttcctgcaaggcatct

SEQ ID NO: 4145 - DNA, 75 bp, synthetic construct
  misc_feature 1..75: note = Synthetic construct
  source 1..75: mol_type = other DNA
caggtgcagttggtgcagtctggggctgaagtgaagcagcctggggcctcagtgaaggtgtcctgcaaggcatct

SEQ ID NO: 4146 - DNA, 75 bp, synthetic construct
  misc_feature 1..75: note = Synthetic construct
  source 1..75: mol_type = other DNA
caggtccagctggtacagtctggggctgaggtgaagaagcctggggcctcagtgaaggtctcctgcaaggtttcc

SEQ ID NO: 4147 - DNA, 75 bp, synthetic construct
  misc_feature 1..75: note = Synthetic construct
  source 1..75: mol_type = other DNA
caggtccatcttgtgcagtctggggctgaggtgaagaagcctggggcctcagtgaaggtttcctgcaaggctact

SEQ ID NO: 4148 - DNA, 75 bp, synthetic construct
  misc_feature 1..75: note = Synthetic construct
  source 1..75: mol_type = other DNA
caaatgcagctggtgcagtctgggcctgaggtgaagaagcctgggacctcagtgaaggtctcctgcaaggcttct

SEQ ID NO: 4149 - DNA, 75 bp, synthetic construct
  misc_feature 1..75: note = Synthetic construct
  source 1..75: mol_type = other DNA
caggtgcagctggtggagtctgggggaggcgtggtccagcctggggggtccctgagactctcctgttcagcctct

SEQ ID NO: 4150 - DNA, 75 bp, synthetic construct
  misc_feature 1..75: note = Synthetic construct
  source 1..75: mol_type = other DNA
caggtccagcttgtgcagtctggggctgaggtgaagaagcctggggcctcagtgaaggtttcctgcaagacttct

SEQ ID NO: 4151 - DNA, 75 bp, synthetic construct
  misc_feature 1..75: note = Synthetic construct
  source 1..75: mol_type = other DNA
caggtccagcttgtgcagtctggggctgaggtgaagaggcctggggcctcagttaatctttcctgcgagacttct

SEQ ID NO: 4152 - DNA, 75 bp, synthetic construct
  misc_feature 1..75: note = Synthetic construct
  source 1..75: mol_type = other DNA
gacgtccaagtggtacagtccggggctgaggtgaagaagcctggggccaccgtgaaaatctcctgtaaggcttct

SEQ ID NO: 4153 - DNA, 75 bp, synthetic construct
  misc_feature 1..75: note = Synthetic construct
  source 1..75: mol_type = other DNA
gaggtgcaactggtggagtctgggggaggcctggtcaaatctggggggtccctgagactctcctgtgcagcctct

SEQ ID NO: 4154 - DNA, 75 bp, synthetic construct
  misc_feature 1..75: note = Synthetic construct
  source 1..75: mol_type = other DNA
gaggtgcagctggtggagtctgggggaggcttggtccagcctggagggtccctgagactctcctgtgcagcctct

SEQ ID NO: 4155 - DNA, 75 bp, synthetic construct
  misc_feature 1..75: note = Synthetic construct
  source 1..75: mol_type = other DNA
caggtccaactggtggagtctgggggaggcgtggtccagcctgggaggtccctgagactcgcctgtgaagcgtct

SEQ ID NO: 4156 - DNA, 75 bp, synthetic construct
  misc_feature 1..75: note = Synthetic construct
  source 1..75: mol_type = other DNA
gaggtgcaactagtggagtctgggggagtcttgggacagccagggcggtccctgagactctcctgtacagcctct

SEQ ID NO: 4157 - DNA, 75 bp, synthetic construct
  misc_feature 1..75: note = Synthetic construct
  source 1..75: mol_type = other DNA
gaggtgcagctggtggagactggaggaggcttgatccagccgggggggtccgtgagactctcctgtacagcctct

SEQ ID NO: 4158 - DNA, 75 bp, synthetic construct
  misc_feature 1..75: note = Synthetic construct
  source 1..75: mol_type = other DNA
gaggtgcagttggtggagtctgggggaggcctggtcaaggcgggggggtccctgacactctcgtgtgaagcctcc

SEQ ID NO: 4159 - DNA, 75 bp, synthetic construct
  misc_feature 1..75: note = Synthetic construct
  source 1..75: mol_type = other DNA
caggtgcaactggtggagtctgggggaggcatggtcatgcctggagggtccctgaggctctcctgtgcagcctct

SEQ ID NO: 4160 - DNA, 75 bp, synthetic construct
  misc_feature 1..75: note = Synthetic construct
  source 1..75: mol_type = other DNA
gaggtgcaactggaggagtctgggggagggttggtccagcctggggggtccctgagactctcctgtttagcctct

SEQ ID NO: 4161 - DNA, 75 bp, synthetic construct
  misc_feature 1..75: note = Synthetic construct
  source 1..75: mol_type = other DNA
gaggcacaactgctggagtcggggggagacgtggtacgtccggggggctccctgagactctcctgttcagcctct

SEQ ID NO: 4162 - DNA, 75 bp, synthetic construct
  misc_feature 1..75: note = Synthetic construct
  source 1..75: mol_type = other DNA
gaggtgcagctggtggagtctgggggaggcctggtcaagcctggggggtccctgagactctcctgtgcagtctct

SEQ ID NO: 4163 - DNA, 75 bp, synthetic construct; identical to SEQ ID NO: 1776
  misc_feature 1..75: note = Synthetic construct
  source 1..75: mol_type = other DNA

SEQ ID NO: 4164 - DNA, 75 bp, synthetic construct
  misc_feature 1..75: note = Synthetic construct
  source 1..75: mol_type = other DNA
gaggtgcagctggtggaatctgggggagacttggtccagccgggggggtccttgagactctcctgtgcagcctct

SEQ ID NO: 4165 - DNA, 75 bp, synthetic construct
  misc_feature 1..75: note = Synthetic construct
  source 1..75: mol_type = other DNA
gaggcggaattggtggaatctgggggacgcctggtcaagccgggggggtccgtcagactgtcttgtacagcctct

SEQ ID NO: 4166 - DNA, 75 bp, synthetic construct
  misc_feature 1..75: note = Synthetic construct
  source 1..75: mol_type = other DNA
gaggtgcagttggtggagtctgggggaggcttggttcagccgggggggtccctgagactctcctgtgcagcctct

SEQ ID NO: 4167 - DNA, 75 bp, synthetic construct
  misc_feature 1..75: note = Synthetic construct
  source 1..75: mol_type = other DNA
caggtccagctggtgcagtctggggctgaggtgaaggagcctgggtcctcggtgaaggtctcctgccagacttct

SEQ ID NO: 4168 - DNA, 75 bp, synthetic construct
  misc_feature 1..75: note = Synthetic construct
  source 1..75: mol_type = other DNA
caggtgcaactggtgcagtctggggctgcggtgaagacgcctggggcctcagtgaaggtctcctgcaagacctct

SEQ ID NO: 4169 - DNA, 75 bp, synthetic construct
  misc_feature 1..75: note = Synthetic construct
  source 1..75: mol_type = other DNA
caggtccagctggtgcaatctgaggctgaggtgaagaggcctgggtcctcggtcaaggtctcctgcagggcttct

SEQ ID NO: 4170 - DNA, 75 bp, synthetic construct
  misc_feature 1..75: note = Synthetic construct
  source 1..75: mol_type = other DNA
gaaatgcaactggcgcagtctgggcccgaggtgagaaagcctggggcctcagtgagggtggcctgcaagacgtct

SEQ ID NO: 4171 - DNA, 75 bp, synthetic construct
  misc_feature 1..75: note = Synthetic construct
  source 1..75: mol_type = other DNA
gaggtccagctcgtacagtccggggctgaggtgaagaagcctggggccaccgtgagaatctcctgcagggcttct

SEQ ID NO: 4172 - DNA, 75 bp, synthetic construct
  misc_feature 1..75: note = Synthetic construct
  source 1..75: mol_type = other DNA
caggtgcaattggtgcagtctggggctgaggtgaagaagcctggggcctcagtgaaggtctcctgcaaggcttct

SEQ ID NO: 4173 - DNA, 75 bp, synthetic construct
  misc_feature 1..75: note = Synthetic construct
  source 1..75: mol_type = other DNA
gaggtccagctggtgcagtccggggctgaggtgaagaagcctggggccaccgtgaaaatctcctgcaaggcctct

SEQ ID NO: 4174 - DNA, 75 bp, synthetic construct
  misc_feature 1..75: note = Synthetic construct
  source 1..75: mol_type = other DNA
caggtgcaactggtgcaatctgggtctgaggtgaagaggactgggacctcagtgaaagtctcctgcaggacttct

SEQ ID NO: 4175 - DNA, 75 bp, synthetic construct
  misc_feature 1..75: note = Synthetic construct
  source 1..75: mol_type = other DNA
caggtgcaactggtgcagtctggggctgaggtgaagaagcctggggcctcagtgaaggtctcctgcaaggcttct

SEQ ID NO: 4176 - DNA, 75 bp, synthetic construct
  misc_feature 1..75: note = Synthetic construct
  source 1..75: mol_type = other DNA
caggtccgacttgtgcaatctggggctgaattgaagaagcctggggcctcagtgaaggtttcctgcaaggcttct

SEQ ID NO: 4177 - DNA, 75 bp, synthetic construct
  misc_feature 1..75: note = Synthetic construct
  source 1..75: mol_type = other DNA
gcagtgcagctgttggagtctgggggaggcttggcacagccgggggggtccctgagactctcctgtgcagtctcc

SEQ ID NO: 4178 - DNA, 75 bp, synthetic construct; identical to SEQ ID NO: 1779
  misc_feature 1..75: note = Synthetic construct
  source 1..75: mol_type = other DNA

SEQ ID NO: 4179 - DNA, 75 bp, synthetic construct
  misc_feature 1..75: note = Synthetic construct
  source 1..75: mol_type = other DNA
gaggtccacctgctacagtccggggctgaggtgaagaagcctggggcctccgtgaaaatctcctgcaaggcttct

SEQ ID NO: 4180 - DNA, 75 bp, synthetic construct
  misc_feature 1..75: note = Synthetic construct
  source 1..75: mol_type = other DNA
caggtccacctggtgcagtctggggcagaggtgaagaagccggggtcctcggtgaaggtctcctgccaggcatct

SEQ ID NO: 4181 - DNA, 75 bp, synthetic construct
  misc_feature 1..75: note = Synthetic construct
  source 1..75: mol_type = other DNA
cagctccagctggagcagtctggggctgaggtgaagaggcctgggtccgcagtgaaggtctcctgcatggcttct

SEQ ID NO: 4182 - DNA, 75 bp, synthetic construct
  misc_feature 1..75: note = Synthetic construct
  source 1..75: mol_type = other DNA
caggtccacctggagcagtctggggctgaggtgaagaagcctgggtcctcggtgaaggtctcctgcaaggcttct

SEQ ID NO: 4183 - DNA, 75 bp, synthetic construct
  misc_feature 1..75: note = Synthetic construct
  source 1..75: mol_type = other DNA
gaggtgcaactggcggagtctgggggaggcctggtcaagcctggggggtccctgagactctcctgtgcagcctct

SEQ ID NO: 4184 - DNA, 75 bp, synthetic construct
  misc_feature 1..75: note = Synthetic construct
  source 1..75: mol_type = other DNA
ggggtgcagctggtggagtctgggggaggcttggtacagcctggagggtccctgagactctcctgtgcagactct

SEQ ID NO: 4185 - DNA, 75 bp, synthetic construct
  misc_feature 1..75: note = Synthetic construct
  source 1..75: mol_type = other DNA
caggtacaactggtgcaatctgggtctgagttgaagaagcctggggcctcagtgaaggtttcctgcaaggcttct

SEQ ID NO: 4186 - DNA, 75 bp, synthetic construct
  misc_feature 1..75: note = Synthetic construct
  source 1..75: mol_type = other DNA
gaggtacagctggtggagtctgggggaggcttggtccaggctggggggtccctaagactctcctgtacagcctct

SEQ ID NO: 4187 - DNA, 75 bp, synthetic construct
  misc_feature 1..75: note = Synthetic construct
  source 1..75: mol_type = other DNA
gagattcagttgttggagtctggaggaggcttggcacagcctggggggtccctgacactctcctgtgcagcctct

SEQ ID NO: 4188 - DNA, 75 bp, synthetic construct
  misc_feature 1..75: note = Synthetic construct
  source 1..75: mol_type = other DNA
gaggtgcacctggtggagtctgggggaggcttggtccagcctggggggtccctgagactctcctgtacagcctct

SEQ ID NO: 4189 - DNA, 75 bp, synthetic construct
  misc_feature 1..75: note = Synthetic construct
  source 1..75: mol_type = other DNA
gaggtgcaactggtggagtctgggggaggggtggttcagccagggcggtccctgagactctcctgtaaaggttct

SEQ ID NO: 4190 - DNA, 75 bp, synthetic construct; identical to SEQ ID NO: 1775
  misc_feature 1..75: note = Synthetic construct
  source 1..75: mol_type = other DNA

SEQ ID NO: 4191 - DNA, 75 bp, synthetic construct
  misc_feature 1..75: note = Synthetic construct
  source 1..75: mol_type = other DNA
gacgtgcagttggtggagtctgggggaggcttggtgaagccgggggggtcccttagactctcctgtgcagcctct

SEQ ID NO: 4192 - DNA, 12 bp, synthetic construct
  misc_feature 1..12: note = Synthetic construct
  source 1..12: mol_type = other DNA
gggagaggttct

SEQ ID NO: 4193 - DNA, 75 bp, synthetic construct
  misc_feature 1..75: note = Synthetic construct
  source 1..75: mol_type = other DNA
gaggtgcagctggtgcaatccggggggggcctggtgcagccagggcggtccctcagactctcctgtagaggttct

SEQ ID NO: 4194 - DNA, 75 bp, synthetic construct
  misc_feature 1..75: note = Synthetic construct
  source 1..75: mol_type = other DNA
caggtgcagctggtacaatctggccctgagctgaagaagcctggggcctcagtgaaaatttcctgccaggcatct

SEQ ID NO: 4195 - DNA, 75 bp, synthetic construct
  misc_feature 1..75: note = Synthetic construct
  source 1..75: mol_type = other DNA
caggtgcagctggtggagtctgggggaggcgtggtccagcctgggacgtccctgagactctcctgtgcaggctct

SEQ ID NO: 4196 - DNA, 75 bp, synthetic construct
  misc_feature 1..75: note = Synthetic construct
  source 1..75: mol_type = other DNA
cagatcacgttgagggagtctggtcctgcggtggttctccccacacagaccctcacactgacctgcaccttctct

SEQ ID NO: 4197 - DNA, 75 bp, synthetic construct
  misc_feature 1..75: note = Synthetic construct
  source 1..75: mol_type = other DNA
caggttcaccttgagcagtctggagatgaggtgaagaagcctggggcctcagtgaaggtctcctgcaagacttct

SEQ ID NO: 4198 - DNA, 75 bp, synthetic construct
  misc_feature 1..75: note = Synthetic construct
  source 1..75: mol_type = other DNA
caggtgcaggtgctggagtctgggggaggcgtggtccagcctgggaggtccctgagactctcctgtgcagcctct

SEQ ID NO: 4199 - DNA, 75 bp, synthetic construct
  misc_feature 1..75: note = Synthetic construct
  source 1..75: mol_type = other DNA
caggtgcagctggtgcagtctggggctgaagtgaagaagcctggggcctcagtgacggtctcctgcaaggcttct

SEQ ID NO: 4200 - DNA, 75 bp, synthetic construct
  misc_feature 1..75: note = Synthetic construct
  source 1..75: mol_type = other DNA
caggtccaggtggtgcagtctggggctgaggtgaagaagcctgggtcctcggtgaaggtctcctgcgagactctt

SEQ ID NO: 4201 - DNA, 75 bp, synthetic construct
  misc_feature 1..75: note = Synthetic construct
  source 1..75: mol_type = other DNA
caggtccagctggtgcagtctggggctgcgatgaagaagcctgggtcctcggtgagggtctcctgcaaggctgct

SEQ ID NO: 4202 - DNA, 75 bp, synthetic construct
  misc_feature 1..75: note = Synthetic construct
  source 1..75: mol_type = other DNA
caggtcctgctggtgcagtctggggctgaggtgaagaagcctgggtcctcgataaaggtctcctgcaaggcttct

SEQ ID NO: 4203 - DNA, 75 bp, synthetic construct
  misc_feature 1..75: note = Synthetic construct
  source 1..75: mol_type = other DNA
cagttcaccttgaaggagtctggtcctgtgctggtgaaacccacagagaccctcacgctgacctgcaccgtctct

SEQ ID NO: 4204 - DNA, 75 bp, synthetic construct
  misc_feature 1..75: note = Synthetic construct
  source 1..75: mol_type = other DNA
caggtcaccttgagggagtctggtcctgcgctggtgaaacccacacagaccctcacactgacctgcaccttctct

SEQ ID NO: 4205 - DNA, 75 bp, synthetic construct
  misc_feature 1..75: note = Synthetic construct
  source 1..75: mol_type = other DNA
caggtccaattgattcaatctgggcctgaggtgaagaagccggggtcctcgttgaaggtctcctgcaaggggtct

SEQ ID NO: 4206 - DNA, 75 bp, synthetic construct
  misc_feature 1..75: note = Synthetic construct
  source 1..75: mol_type = other DNA
caggttcagttggtgcagtctggagctgaggtgcagaagcctggggcctcagtgaaggtctcctgcacggcctct

SEQ ID NO: 4207 - DNA, 75 bp, synthetic construct
  misc_feature 1..75: note = Synthetic construct
  source 1..75: mol_type = other DNA
gaggtgcagttggtacagtctggaacagaggcgaagaagccgggggagtcgctgaagatctcctgtaaggcttct

SEQ ID NO: 4208 - DNA, 75 bp, synthetic construct
  misc_feature 1..75: note = Synthetic construct
  source 1..75: mol_type = other DNA
caggtgcagctgcagccgtggggcgcaagactgttgaagccctcggagaccctgtccctcacgtgcgctgtgtct

SEQ ID NO: 4209 - DNA, 75 bp, synthetic construct
  misc_feature 1..75: note = Synthetic construct
  source 1..75: mol_type = other DNA
gagatgcaggtggtggaatctggaggaggctgggtccggcctggggggtccctgagactctcctgtgcagcctct

SEQ ID NO: 4210 - DNA, 75 bp, synthetic construct
  misc_feature 1..75: note = Synthetic construct
  source 1..75: mol_type = other DNA
gaggagcagctggtggagtctgggggaggcttggtacagccagggcggtccctgagactctcctgtacaggttct

SEQ ID NO: 4211 - DNA, 75 bp, synthetic construct
  misc_feature 1..75: note = Synthetic construct
  source 1..75: mol_type = other DNA
caggtcaccttgagggagtctggtcctgcggtggtgaaacccacacagaccctcacactgacctgcaccgtctct

SEQ ID NO: 4212 - DNA, 75 bp, synthetic construct
  misc_feature 1..75: note = Synthetic construct
  source 1..75: mol_type = other DNA
caggtcaccttgaaggagtctggtcctgtgctggtgaaacccacagagaccctcacgctgacctgcaccgtctct

SEQ ID NO: 4213 - DNA, 75 bp, synthetic construct
  misc_feature 1..75: note = Synthetic construct
  source 1..75: mol_type = other DNA
caggtcaccttaaaggagtctggtcctgttctggtgaaacccacacagaccctcactctgacctgcgccttctct

SEQ ID NO: 4214 - DNA, 75 bp, synthetic construct
  misc_feature 1..75: note = Synthetic construct
  source 1..75: mol_type = other DNA
caggtcaccttgaaggagtctggtcctgtgctggtgaaacccacacagaccctcacactgacctgcaccttctct

SEQ ID NO: 4215 - DNA, 75 bp, synthetic construct
  misc_feature 1..75: note = Synthetic construct
  source 1..75: mol_type = other DNA
caggtcaccttgaaggagtctggtcctgtgctgctgaaacccacagagaccctcacgctgacctgcaccgtctcg

SEQ ID NO: 4216 - DNA, 75 bp, synthetic construct
  misc_feature 1..75: note = Synthetic construct
  source 1..75: mol_type = other DNA
gaggtgcagctggtggagtcggggggaggcctggcacagccagggcggtcgctgacactctcctgcacgggttcc

SEQ ID NO: 4217 - DNA, 75 bp, synthetic construct
  misc_feature 1..75: note = Synthetic construct
  source 1..75: mol_type = other DNA
caggtcaccttgagggagtctggtcctgcgctggtgaaatccacacagaccctcacactgacctgcaccttctct

SEQ ID NO: 4218 - DNA, 75 bp, synthetic construct
  misc_feature 1..75: note = Synthetic construct
  source 1..75: mol_type = other DNA
gaggtcgttttgttggagtcgggggggggcttagtgcagccgggcgggtctctgagactctcctgtggaggctct

SEQ ID NO: 4219 - DNA, 75 bp, synthetic construct
  misc_feature 1..75: note = Synthetic construct
  source 1..75: mol_type = other DNA
caggtcaccttgagggagtccggtcctgcgctggtgaaacccacacagaccctcacaatgacctgcaccttctct

SEQ ID NO: 4220 - DNA, 75 bp, synthetic construct
  misc_feature 1..75: note = Synthetic construct
  source 1..75: mol_type = other DNA
cagatcaccttgaaggagtctggtcctacgctggtgaaacccacacagaccctcacgctgacctgcaccgtctct

SEQ ID NO: 4221 - DNA, 75 bp, synthetic construct
  misc_feature 1..75: note = Synthetic construct
  source 1..75: mol_type = other DNA
cagatcaccttgcgggagtctggtccaacggtggtgaaacccacacagaccctcacgctgacctgcagcttttct

SEQ ID NO: 4222 - DNA, 75 bp, synthetic construct
  misc_feature 1..75: note = Synthetic construct
  source 1..75: mol_type = other DNA
cagatcaccttgaaggagtctggtcctacgctggtgaaacccagacagaccctcacgctgacctgcaccttctct

SEQ ID NO: 4223 - DNA, 75 bp, synthetic construct
  misc_feature 1..75: note = Synthetic construct
  source 1..75: mol_type = other DNA
cagatcaccttgaaggagtctggtcctacgctggtgaaacccacacagaccctcacgctgacctgcaccttctct

SEQ ID NO: 4224 - DNA, 75 bp, synthetic construct
  misc_feature 1..75: note = Synthetic construct
  source 1..75: mol_type = other DNA
cagatcaccttggaggagtctggtcctgcgctggtgaaacccacacagaccctcacgctgacctgttccttgtct

SEQ ID NO: 4225 - DNA, 75 bp, synthetic construct
  misc_feature 1..75: note = Synthetic construct
  source 1..75: mol_type = other DNA
cagatcaccttgaaggagtctggtcctacgctggtgaaagccacacagaccctcacgctgacctgcaccttctct

SEQ ID NO: 4226 - DNA, 75 bp, synthetic construct
  misc_feature 1..75: note = Synthetic construct
  source 1..75: mol_type = other DNA
gaggtgcagttgttggagtcggggggagacttggttcagcctgggagatccctgagactctcgtgttcagcctct

SEQ ID NO: 4227 - DNA, 75 bp, synthetic construct
  misc_feature 1..75: note = Synthetic construct
  source 1..75: mol_type = other DNA
gacgcgggcttggaggagtctgggggaggcttggtacagcctggcgggtccctgagactctcctgtgaaggttct

SEQ ID NO: 4228 - DNA, 75 bp, synthetic construct
  misc_feature 1..75: note = Synthetic construct
  source 1..75: mol_type = other DNA
caggtgcagctgcaggagtcgggcccaggactggtgaagccttcggagaccctgtccctcacctgttctgtctct

SEQ ID NO: 4229 - DNA, 75 bp, synthetic construct
  misc_feature 1..75: note = Synthetic construct
  source 1..75: mol_type = other DNA
caggtacagctgcagcagtcaggtccaggactggtgaagccctcgcagaccctctcactcacctgtgccatctcc

SEQ ID NO: 4230 - DNA, 75 bp, synthetic construct
  misc_feature 1..75: note = Synthetic construct
  source 1..75: mol_type = other DNA
caggtgcagctgaaggagtcgggcccaggactggtgaagccttcacagaccctgtccctcacctgcgctgtctct

SEQ ID NO: 4231 - DNA, 75 bp, synthetic construct
  misc_feature 1..75: note = Synthetic construct
  source 1..75: mol_type = other DNA
caggtgcagctgcaggagtcgggcccaggactggtgaagccttcggagaccctgtccctcatctgcactgtctct

SEQ ID NO: 4232 - DNA, 75 bp, synthetic construct
  misc_feature 1..75: note = Synthetic construct
  source 1..75: mol_type = other DNA
caggtgcagctacaacagtggggcgcaggactgctgaagccttcggagaccctgtccctcacctgcgctgtctat

SEQ ID NO: 4233 - DNA, 75 bp, synthetic construct
  misc_feature 1..75: note = Synthetic construct
  source 1..75: mol_type = other DNA
caggtgcagctacaacagtggggcgcaggactgctgaagctttcggagaccctgtccctcacctgcgctgtctat

SEQ ID NO: 4234 - DNA, 75 bp, synthetic construct
  misc_feature 1..75: note = Synthetic construct
  source 1..75: mol_type = other DNA
caggtgcagctacagcagtggggcgcaggactgttgaagccttcggagaccctgtccctcacctgcactgtttct

SEQ ID NO: 4235 - DNA, 75 bp, synthetic construct
  misc_feature 1..75: note = Synthetic construct
  source 1..75: mol_type = other DNA
cacgtgcagctgcaagaatcgggcccaggactggtgaagccttcggagaccctgtccctcacctgcactgtctct

SEQ ID NO: 4236 - DNA, 75 bp, synthetic construct
  misc_feature 1..75: note = Synthetic construct
  source 1..75: mol_type = other DNA
caggtgcagctgcaggagtcgggcccaggactggtgaaggcttcacagaccctgtccctcacctgcactgtctct

SEQ ID NO: 4237 - DNA, 75 bp, synthetic construct
  misc_feature 1..75: note = Synthetic construct
  source 1..75: mol_type = other DNA
caggtgcagctgcaggagtcgggcccaggactggtgaagccttcacagaccctgtccctcacctgcagtctctct

SEQ ID NO: 4238 - DNA, 75 bp, synthetic construct
  misc_feature 1..75: note = Synthetic construct
  source 1..75: mol_type = other DNA
caggtgcaactgcaggagtcgggcccaggactggtgaagtcttcagagaccctgtccctcacttgcactgtctct

SEQ ID NO: 4239 - DNA, 75 bp, synthetic construct
  misc_feature 1..75: note = Synthetic construct
  source 1..75: mol_type = other DNA
caggtgcagctgcaggagtcgggcccaggactggtgaagccttcacagaccctctccctcacctgcactgtctct

SEQ ID NO: 4240 - DNA, 75 bp, synthetic construct
  misc_feature 1..75: note = Synthetic construct
  source 1..75: mol_type = other DNA
caggtgcagctgcaggagtcgggcccaggactggtgaagccctcggagaccctgtcactcacgtgcagtgtctct

SEQ ID NO: 4241 - DNA, 75 bp, synthetic construct
  misc_feature 1..75: note = Synthetic construct
  source 1..75: mol_type = other DNA
caggtgcagctgcaggcgtcgggcccaggactggtgaagccttcggagaccctgtccctcacctgcagtgtgtca

SEQ ID NO: 4242 - DNA, 75 bp, synthetic construct
  misc_feature 1..75: note = Synthetic construct
  source 1..75: mol_type = other DNA
caggtgaaattgcaggagtcgggcccaggagtggtgaagccttcggagaccctgtccctcacctgcactgtcccc

SEQ ID NO: 4243 - DNA, 75 bp, synthetic construct
  misc_feature 1..75: note = Synthetic construct
  source 1..75: mol_type = other DNA
caggtgcagctactcgagtcgggcccaggactggtgaagccttcggggaccctgtccctcgcctgcagtgtctct

SEQ ID NO: 4244 - DNA, 75 bp, synthetic construct
  misc_feature 1..75: note = Synthetic construct
  source 1..75: mol_type = other DNA
caggtgcagctacagcagtggggcgcaggactgttgaagccttcggagaccctgtccctcacctgcggtgtttat

SEQ ID NO: 4245 - DNA, 75 bp, synthetic construct
  misc_feature 1..75: note = Synthetic construct
  source 1..75: mol_type = other DNA
caggtgcagctgcaggagtcgggcccaggactggtgaagccttcggagaccctgtccctcacctgcactgtctct

SEQ ID NO: 4246 - DNA, 75 bp, synthetic construct
  misc_feature 1..75: note = Synthetic construct
  source 1..75: mol_type = other DNA
caggtgcagctgcaggagtcgggcccaggactggtgaagccttcggagaccctgtccctcgcctgcagtgtctct

SEQ ID NO: 4247 - DNA, 75 bp, synthetic construct
  misc_feature 1..75: note = Synthetic construct
  source 1..75: mol_type = other DNA
caggtgcagctgcaggagtcgggccccggactggtgaggccttcggagaccctgtccctcacctgctctgtctct

SEQ ID NO: 4248 - DNA, 75 bp, synthetic construct
  misc_feature 1..75: note = Synthetic construct
  source 1..75: mol_type = other DNA
caggtgcagctgcaggagtcgggcccaggactggtgaagtcttcacagaccctgtccctcacctgcactgtctcc

SEQ ID NO: 4249 - DNA, 75 bp, synthetic construct
  misc_feature 1..75: note = Synthetic construct
  source 1..75: mol_type = other DNA
caggtgcagctgcaggagtcgggcccaggactggtgaagccttcacagaccctgtccctcacctgcactgtctct

SEQ ID NO: 4250 - DNA, 75 bp, synthetic construct
  misc_feature 1..75: note = Synthetic construct
  source 1..75: mol_type = other DNA
caggtgcagctgcaggagtcgggcccaggactggtgcagccatcacagaccctgtccctcacctgcactgtctct

SEQ ID NO: 4251 - DNA, 75 bp, synthetic construct
  misc_feature 1..75: note = Synthetic construct
  source 1..75: mol_type = other DNA
cgggtgcagctgcaggagtcgggcccaggagtggtgaagtcttcggagaccctgtccctcacctgcagtgtctct

SEQ ID NO: 4252 - DNA, 75 bp, synthetic construct
  misc_feature 1..75: note = Synthetic construct
  source 1..75: mol_type = other DNA
caggtgcagctgcaggagtcgggcccaggactggtgaggcctggggagaccctgtccctcacctgcactgtctct

SEQ ID NO: 4253 - DNA, 75 bp, synthetic construct
  misc_feature 1..75: note = Synthetic construct
  source 1..75: mol_type = other DNA
caggtacagctgcaggagtcgggcccagggctggtgaagccttcacagaccctgtccctcacctgcactgtctct

SEQ ID NO: 4254 - DNA, 75 bp, synthetic construct
  misc_feature 1..75: note = Synthetic construct
  source 1..75: mol_type = other DNA
caggtgcagctgcaggagtcgggcccgggactggtgaggccctcagagaccctgtccctcatgtgctcggtctcg

SEQ ID NO: 4255 - DNA, 75 bp, synthetic construct
  misc_feature 1..75: note = Synthetic construct
  source 1..75: mol_type = other DNA
caggtgcagctacagcagtggggcgcaggtctgttgaagccttcggagaccctgtccctcacctgcgctgtctat

SEQ ID NO: 4256 - DNA, 75 bp, synthetic construct
  misc_feature 1..75: note = Synthetic construct
  source 1..75: mol_type = other DNA
caggtgcagctacagcagtggggcgcaggactgttgaagccttcggagaccctgtccctcacctgcgctgtctct

SEQ ID NO: 4257 - DNA, 75 bp, synthetic construct
  misc_feature 1..75: note = Synthetic construct
  source 1..75: mol_type = other DNA
caggagcaattacagcagtggggcgcaggactgttgaagccttcggagaccctgtccctcacctgcgctgcctat

SEQ ID NO: 4258 - DNA, 75 bp, synthetic construct
  misc_feature 1..75: note = Synthetic construct
  source 1..75: mol_type = other DNA
caggtgcagctacagcagtggggcgcaggactgttgaagccttcggagaccctgtccctcacctgcgctgtctat

SEQ ID NO: 4259 - DNA, 75 bp, synthetic construct
  misc_feature 1..75: note = Synthetic construct
  source 1..75: mol_type = other DNA
caggtgcaggtacagcagtggggcgcaggactgttgaagccttcggagaccctgtccctcacctgcgctgtctat

SEQ ID NO: 4260 - DNA, 75 bp, synthetic construct
  misc_feature 1..75: note = Synthetic construct
  source 1..75: mol_type = other DNA
caggtgcagctgcagcagtggggcgcaggcctgttgaagccttcggagaccctgtcactcacctgcgctgtctat

SEQ ID NO: 4261 - DNA, 75 bp, synthetic construct
  misc_feature 1..75: note = Synthetic construct
  source 1..75: mol_type = other DNA
caggtgcggcttcagcagtggggcgcaggactgttgaagccttcggagaccctgtccctcacctgcgctgtctat

SEQ ID NO: 4262 - DNA, 75 bp, synthetic construct
  misc_feature 1..75: note = Synthetic construct
  source 1..75: mol_type = other DNA
caggtgcagctacagcagtggggcccaggactgttgaagccttcggagaccctgtccctcacctgcgctgtttct

SEQ ID NO: 4263 - DNA, 75 bp, synthetic construct
  misc_feature 1..75: note = Synthetic construct
  source 1..75: mol_type = other DNA
caagtacagctacaacagtggggcgcaggactgttgaagccttcggagaccctgtctctcatctgtgctgtctat

SEQ ID NO: 4264 - DNA, 75 bp, synthetic construct
  misc_feature 1..75: note = Synthetic construct
  source 1..75: mol_type = other DNA
caggtgcagctccaacaatggggcgcaagactgttgaagccttcggagaccctgtccctcacctgcgctgtctat

SEQ ID NO: 4265 - DNA, 75 bp, synthetic construct
  misc_feature 1..75: note = Synthetic construct
  source 1..75: mol_type = other DNA
caggtgcagctgcaggagtcgggcccaggactggtgaagccttcacagaccctgttcctcacctgcgatgtctct

SEQ ID NO: 4266 - DNA, 75 bp, synthetic construct
  misc_feature 1..75: note = Synthetic construct
  source 1..75: mol_type = other DNA
cagctgcagctgcaggagtccggctcaggactggtgaagccttcacagaccctgtccctcacctgcgctgtctct

SEQ ID NO: 4267 - DNA, 75 bp, synthetic construct
  misc_feature 1..75: note = Synthetic construct
  source 1..75: mol_type = other DNA
caggtgcagctgcaggagtcgggcccgggactggtgaagccttcacagaccctgtccctcacctgctctgtctct

SEQ ID NO: 4268 - DNA, 75 bp, synthetic construct
  misc_feature 1..75: note = Synthetic construct
  source 1..75: mol_type = other DNA
caggtgcacctgcaggagtcgggcccaggactggtgaagccctcggcgaccctgtccctcacctgcaatgtctct

SEQ ID NO: 4269 - DNA, 75 bp, synthetic construct
  misc_feature 1..75: note = Synthetic construct
  source 1..75: mol_type = other DNA
caggtgcagctgcaggagtcgggcccaggactggtgaagccttcggagaccctgtctctcacctgcagtgtctct

SEQ ID NO: 4270 - DNA, 75 bp, synthetic construct
  misc_feature 1..75: note = Synthetic construct
  source 1..75: mol_type = other DNA
caggtgcacctgcaggagtcgggcccaggactggtgaagccttcggagaccctgtccctcacctgcactgtctct

SEQ ID NO: 4271 - DNA, 75 bp, synthetic construct
  misc_feature 1..75: note = Synthetic construct
  source 1..75: mol_type = other DNA
caggtgcagctgcaggagtcgggcccgggactggtgaagccttcggagaccctgtccctcacctgcactgtctct

SEQ ID NO: 4272 - DNA, 75 bp, synthetic construct
  misc_feature 1..75: note = Synthetic construct
  source 1..75: mol_type = other DNA
caggtgcaactactggagtcgggcccaggactggtgaagccttcacagaccctgtccctcacctgcaatgtctct

SEQ ID NO: 4273 - DNA, 75 bp, synthetic construct
  misc_feature 1..75: note = Synthetic construct
  source 1..75: mol_type = other DNA
caggtgcagctgcaggagtcggggccaggactggtgaagccttcacagaccctgtccctcacttgcactgtctct

SEQ ID NO: 4274 - DNA, 75 bp, synthetic construct
  misc_feature 1..75: note = Synthetic construct
  source 1..75: mol_type = other DNA
caggtgcagctgcaggagtcgggcccaggactggtgaagccttcggagaccctgtccctcacctgcagtgtctct

SEQ ID NO: 4275 - DNA, 75 bp, synthetic construct
  misc_feature 1..75: note = Synthetic construct
  source 1..75: mol_type = other DNA
caagtgcagctgcaggagtcgggcccaggactggtaaagccttcggagaccctgtccgtcacctgcactgtctct

SEQ ID NO: 4276 - DNA, 75 bp, synthetic construct
  misc_feature 1..75: note = Synthetic construct
  source 1..75: mol_type = other DNA
caggtgcagctacaggagtcgggcccaggactggtgaagccttcggagaccctgtccctcacctgcaatgtctct

SEQ ID NO: 4277 - DNA, 75 bp, synthetic construct
  misc_feature 1..75: note = Synthetic construct
  source 1..75: mol_type = other DNA
caggtgcagctgcaggagtcgggcccaggactggtgaaaccttcggagaccctgtccctcacctgcactgtctct

SEQ ID NO: 4278 - DNA, 75 bp, synthetic construct
  misc_feature 1..75: note = Synthetic construct
  source 1..75: mol_type = other DNA
caggtgcagctacagcagtggggcggaggactcttgaagccttcggagaccctgtccctcacctgcggtgtctat

SEQ ID NO: 4279 - DNA, 75 bp, synthetic construct
  misc_feature 1..75: note = Synthetic construct
  source 1..75: mol_type = other DNA
ctggtgcagctgcaggagtcgggcccaggactggtgaagccttcggagaccctgtccctcacctgcactgtctct

SEQ ID NO: 4280 - DNA, 75 bp, synthetic construct
  misc_feature 1..75: note = Synthetic construct
  source 1..75: mol_type = other DNA
caggtgcagttgcaggagtcgggcccaggactggtaaagccttcggagaccctgtccctcacttgctctgtctct

SEQ ID NO: 4281 - DNA, 75 bp, synthetic construct
  misc_feature 1..75: note = Synthetic construct
  source 1..75: mol_type = other DNA
caggtgcaactgcaacagtggggcgcaggagtgttgaagccttcggagaccctgtccctcacctgcgctgtcgat

SEQ ID NO: 4282 - DNA, 75 bp, synthetic construct
  misc_feature 1..75: note = Synthetic construct
  source 1..75: mol_type = other DNA
caggtgcaaatacaacagtggggcgcaggactgttgaagccttcggagaccctgtccctcacctgcgctgtctat

SEQ ID NO: 4283 - DNA, 75 bp, synthetic construct
  misc_feature 1..75: note = Synthetic construct
  source 1..75: mol_type = other DNA
caggtgcagctacagcagtggggcgcaggactgttgaagccttcggagaccctgtccctcacctgcggtgtctat

SEQ ID NO: 4284 - DNA, 75 bp, synthetic construct
  misc_feature 1..75: note = Synthetic construct
  source 1..75: mol_type = other DNA
caggtgcagctacagcagtggggcgcaggactgttgaagtcttcggagaccctgtccctcacctgcgctgtttat

SEQ ID NO: 4285 - DNA, 75 bp, synthetic construct
  misc_feature 1..75: note = Synthetic construct
  source 1..75: mol_type = other DNA
caggtgcaattacagcagtggggcggaggactgttgaagccttcggagaccccgtccctcacctgcggtgtctct

SEQ ID NO: 4286 - DNA, 75 bp, synthetic construct
  misc_feature 1..75: note = Synthetic construct
  source 1..75: mol_type = other DNA
caggtgcagctgcaggagtcgggcccaggactggtgaagccttcgcagaccgtgtccctcacctgtgctgtctct

SEQ ID NO: 4287 - DNA, 75 bp, synthetic construct
  misc_feature 1..75: note = Synthetic construct
  source 1..75: mol_type = other DNA
caggtgcacctgcaggagtcgggcccaggactggtgaagccttcggcgaccctgtccctcacctgcaatgtctct

SEQ ID NO: 4288 - DNA, 75 bp, synthetic construct
  misc_feature 1..75: note = Synthetic construct
  source 1..75: mol_type = other DNA
caggtgcaaatacaagagtcgggcccaggactggtgaggccttcggagaccctgtcgctcacctgcagtgtctct

SEQ ID NO: 4289 - DNA, 75 bp, synthetic construct
  misc_feature 1..75: note = Synthetic construct
  source 1..75: mol_type = other DNA
caggtgcagctgcagcagtggggcgcagggctgttgaagccttcggagaccctgtccctcacctgcgctgtgtat

SEQ ID NO: 4290 - DNA, 75 bp, synthetic construct
  misc_feature 1..75: note = Synthetic construct
  source 1..75: mol_type = other DNA
catcttctactacaggagtcgggcccaggactagtaaagccttgggagaccctgtccctcagttgcactgtctct

SEQ ID NO: 4291 - DNA, 75 bp, synthetic construct
  misc_feature 1..75: note = Synthetic construct
  source 1..75: mol_type = other DNA
caggtgcagctgcaggagtcgggcccaggactggtgaagccttcacagaccctgtccctcacttgcactgtctcg

SEQ ID NO: 4292 - DNA, 75 bp, synthetic construct
  misc_feature 1..75: note = Synthetic construct
  source 1..75: mol_type = other DNA
caggtgcacctgcaggagtcgggcccaggactggtgaagacttcggaaaccctgtccctcacctgcgttgtttct

SEQ ID NO: 4293 - DNA, 75 bp, synthetic construct
  misc_feature 1..75: note = Synthetic construct
  source 1..75: mol_type = other DNA
cagctgcaacttcaggagtcgggcccaagactcttgaggccttcggagaccctgtccctcacctgcgctgtctct

SEQ ID NO: 4294 - DNA, 75 bp, synthetic construct
  misc_feature 1..75: note = Synthetic construct
  source 1..75: mol_type = other DNA
caactgcagctgcaggagtcgggcccagggctggtgaagccctcggagaccctgtccctcacctgcactgtctct

SEQ ID NO: 4295 - DNA, 75 bp, synthetic construct
  misc_feature 1..75: note = Synthetic construct
  source 1..75: mol_type = other DNA
cagctgcagctgcaggagtcgggcccaggactggtgaagccctcggagaccctgtccctcacctgcactgtctct

SEQ ID NO: 4296 - DNA, 75 bp, synthetic construct
  misc_feature 1..75: note = Synthetic construct
  source 1..75: mol_type = other DNA
cacctgcagctgcaggggtcggacccaggactggtgaagccttcggagaccctgtccctcacctgcactgtctct

SEQ ID NO: 4297 - DNA, 75 bp, synthetic construct
  misc_feature 1..75: note = Synthetic construct
  source 1..75: mol_type = other DNA
cagctgcagctgcaggagtcgggcccaggactggtgaagccttcggagaccctgtccctcacctgcactgtctct

SEQ ID NO: 4298 - DNA, 75 bp, synthetic construct
  misc_feature 1..75: note = Synthetic construct
  source 1..75: mol_type = other DNA
cagctgcagctgcaggagtcgggcccaggactggtgaagccttcggagaccctgtccctcacctgcactgtctca

SEQ ID NO: 4299 - DNA, 75 bp, synthetic construct
  misc_feature 1..75: note = Synthetic construct
  source 1..75: mol_type = other DNA
cagctgcagctgcaggagtcgggcccaggactggtgaagccttcggagaccctgttcctcacctgctctgtctct

SEQ ID NO: 4300 - DNA, 75 bp, synthetic construct
  misc_feature 1..75: note = Synthetic construct
  source 1..75: mol_type = other DNA
cagctgcagctgcaggagtcgggcccaggactggtgaggccttcggagaccctgtccctcacctgctctgtctct

SEQ ID NO: 4301 - DNA, 75 bp, synthetic construct
  misc_feature 1..75: note = Synthetic construct
  source 1..75: mol_type = other DNA
caggtgcagctgcaggagtcgggcccaggactggtgaggccttcggagaccctgtccctcacctgcactgtctct

SEQ ID NO: 4302 - DNA, 75 bp, synthetic construct
  misc_feature 1..75: note = Synthetic construct
  source 1..75: mol_type = other DNA
caggtgcagctgcaggagtcgggcccaggaccggtgaagccttcggagaccctgtccctcacctgcacagtctct

SEQ ID NO: 4303 - DNA, 75 bp, synthetic construct
  misc_feature 1..75: note = Synthetic construct
  source 1..75: mol_type = other DNA
caggtgcagctgcaggagtcgggccccggcctggtgaagccttcggagaccctgtccctcacctgcgctgtctct

SEQ ID NO: 4304 - DNA, 75 bp, synthetic construct
  misc_feature 1..75: note = Synthetic construct
  source 1..75: mol_type = other DNA
caggtgcagctgcaggagtcggggccaggactggtgaagccttcggagaccctgtccctcacctgcgctgtctct

SEQ ID NO: 4305 - DNA, 75 bp, synthetic construct
  misc_feature 1..75: note = Synthetic construct
  source 1..75: mol_type = other DNA
caggtgcagttgcaggagtcgggcccaggactggtgaagccttcggagaccctgtccctcacctgcgctgtctct

SEQ ID NO: 4306 - DNA, 75 bp, synthetic construct
  misc_feature 1..75: note = Synthetic construct
  source 1..75: mol_type = other DNA
cacgtgcagctgcaagagtggggcccaggactggtgaagccttcggagaccctgtccctaacctgcgttgtctct

SEQ ID NO: 4307 - DNA, 75 bp, synthetic construct
  misc_feature 1..75: note = Synthetic construct
  source 1..75: mol_type = other DNA
caggtgcagctgcaggagtcgggcccacgactggtgaagtcttcggagaccctgtccctcacctgcgctgtctct

SEQ ID NO: 4308 - DNA, 75 bp, synthetic construct
  misc_feature 1..75: note = Synthetic construct
  source 1..75: mol_type = other DNA
caggtgcagctgcaggagtcgggcccaggactggtgaagccttcggagaccctgtccctcagttgtgttgtctct

SEQ ID NO: 4309 - DNA, 75 bp, synthetic construct
  misc_feature 1..75: note = Synthetic construct
  source 1..75: mol_type = other DNA
caggtgcagcttcaggagtcgggcccaggactggtgaagccttcggagaccctgtccctcacctgcgctgtctct

SEQ ID NO: 4310 - DNA, 75 bp, synthetic construct
  misc_feature 1..75: note = Synthetic construct
  source 1..75: mol_type = other DNA
caggtgcagctgcaggagtcgggcccaggactggtgaagccttcggagaccctgtccctcacctgcgctgtctct

SEQ ID NO: 4311 - DNA, 75 bp, synthetic construct
  misc_feature 1..75: note = Synthetic construct
  source 1..75: mol_type = other DNA
caggtgcagcttcaggagtcgggcccaggactggtgaagccttcggagaccctgtccctcacctgcactgtctct

SEQ ID NO: 4312 - DNA, 75 bp, synthetic construct
  misc_feature 1..75: note = Synthetic construct
  source 1..75: mol_type = other DNA
caggtgcagctgcaggagtcgggcccaggactggtgaagccttcggaaaccctgtccctcacctgcgctgtctct

SEQ ID NO: 4313 - DNA, 75 bp, synthetic construct
  misc_feature 1..75: note = Synthetic construct
  source 1..75: mol_type = other DNA
cagatacaactacaagagtcgggcccaggactggtgaagccttcggagaccctgtccctcacctgcgctgtctct

SEQ ID NO: 4314 - DNA, 75 bp, synthetic construct
  misc_feature 1..75: note = Synthetic construct
  source 1..75: mol_type = other DNA
caggtgcaactgcaggagtcgggcccacgactggtgaagccttcggagaccctgtccctctcctgcactgtgtct

SEQ ID NO: 4315 - DNA, 75 bp, synthetic construct
  misc_feature 1..75: note = Synthetic construct
  source 1..75: mol_type = other DNA
caggtgcagctgcaggagtcgggcccaggactggtgaggccttcggagaccctgtccctcgcctgcgctgtgtct

SEQ ID NO: 4316 - DNA, 75 bp, synthetic construct
  misc_feature 1..75: note = Synthetic construct
  source 1..75: mol_type = other DNA
cagctgcagctgcaggagtcgggcccaggactggtgaagccctcggagaccctgtccctcacctgcactgtgact

SEQ ID NO: 4317 - DNA, 75 bp, synthetic construct
  misc_feature 1..75: note = Synthetic construct
  source 1..75: mol_type = other DNA
caggtgcagctgcaggagtcgggcccaggactggtgaagccttcggagaccctgtccctcacctgcgttgtctct

SEQ ID NO: 4318 - DNA, 75 bp, synthetic construct
  misc_feature 1..75: note = Synthetic construct
  source 1..75: mol_type = other DNA
caggtgcagctgcaggaatcggggccaggactggtgaagtcttcggagaccctgtccctcagctgtactgtctct

SEQ ID NO: 4319 - DNA, 75 bp, synthetic construct
  misc_feature 1..75: note = Synthetic construct
  source 1..75: mol_type = other DNA
caggtccagctggtgcagtctggggctgaggtgaggaagcctgggtcctcggtgaaggtctcctgcaaggcttcc

SEQ ID NO: 4320 - DNA, 75 bp, synthetic construct
  misc_feature 1..75: note = Synthetic construct
  source 1..75: mol_type = other DNA
caggtcccgctggtgcagtctggggccgaactgaagaagcctgggtcctcggtgacggtctcctgcgaggcttct

SEQ ID NO: 4321 - DNA, 75 bp, synthetic construct
  misc_feature 1..75: note = Synthetic construct
  source 1..75: mol_type = other DNA
caggtccaactggtgcagtctggggctgaggtgaagaggcctgggtcctcggtgaaggtctcctgcaagactcct

SEQ ID NO: 4322 - DNA, 75 bp, synthetic construct
  misc_feature 1..75: note = Synthetic construct
  source 1..75: mol_type = other DNA
caggtccagctggtgcagtctggggctgaggtgaagatgcctgggtcgtcggtgaaggtctcctgcagggcttct

SEQ ID NO: 4323 - DNA, 75 bp, synthetic construct
  misc_feature 1..75: note = Synthetic construct
  source 1..75: mol_type = other DNA
cgggttctgctggtgcagtctggatctgagctgaagaagcctggggcctcagtgaaggtctcctgcaagacctct

SEQ ID NO: 4324 - DNA, 75 bp, synthetic construct
  misc_feature 1..75: note = Synthetic construct
  source 1..75: mol_type = other DNA
gaggtgcagctggtggagtctgggggaggcctggtcgagcctggggggtccctgagactctcttgtataacctca

SEQ ID NO: 4325 - DNA, 75 bp, synthetic construct
  misc_feature 1..75: note = Synthetic construct
  source 1..75: mol_type = other DNA
gaggtccagttggtacagtccggggctgaggtgaagaggcctggggccaccgtgaaaatctcctgcaaggcttct

SEQ ID NO: 4326 - DNA, 75 bp, synthetic construct; identical to SEQ ID NO: 1780
  misc_feature 1..75: note = Synthetic construct
  source 1..75: mol_type = other DNA

SEQ ID NO: 4327 - DNA, 75 bp, synthetic construct
  misc_feature 1..75: note = Synthetic construct
  source 1..75: mol_type = other DNA
caggcgcagctggtggagtcggggggaggcttggtcaagcctggagggtctctgagactctcgtgtatagcctct

SEQ ID NO: 4328 - DNA, 75 bp, synthetic construct
  misc_feature 1..75: note = Synthetic construct
  source 1..75: mol_type = other DNA
gacgtgcagctggtggagtctgggggaggcgtggcacggcctggggggtccctgagactctcctgtgaagcttct

SEQ ID NO: 4329 - DNA, 75 bp, synthetic construct
  misc_feature 1..75: note = Synthetic construct
  source 1..75: mol_type = other DNA
caggtgcagctggtggaatctgggggaggcttggtcaagcctggagggtccctcagactctcctgtgcggcctcc

SEQ ID NO: 4330 - DNA, 75 bp, synthetic construct
  misc_feature 1..75: note = Synthetic construct
  source 1..75: mol_type = other DNA
caggtgcagctggtggagtctgggggaggcgtggtccagcctgggaggtccctgaggctctcctgtgcagcctct

SEQ ID NO: 4331 - DNA, 75 bp, synthetic construct
  misc_feature 1..75: note = Synthetic construct
  source 1..75: mol_type = other DNA
caggtgcaactggtgcagtctggggctgaggtgaagaagcctggggcctcagtggaggtctcctgcaaggcttct

SEQ ID NO: 4332 - DNA, 75 bp, synthetic construct
  misc_feature 1..75: note = Synthetic construct
  source 1..75: mol_type = other DNA
caggtccagttggtacagtctggggctgaggtgaagaggcctggggcctcagtgaaggtctcctgcaaactttcc

SEQ ID NO: 4333 - DNA, 75 bp, synthetic construct
  misc_feature 1..75: note = Synthetic construct
  source 1..75: mol_type = other DNA
cagatcaccttgaaggagtctggtccaacgcttgtagaggccacacagaccctcacgctgacctgcaccttctct

SEQ ID NO: 4334 - DNA, 75 bp, synthetic construct
  misc_feature 1..75: note = Synthetic construct
  source 1..75: mol_type = other DNA
caggtccaattgctgcagtctggggctgaggtgaagacgcctgggtcctcagtgaaaatctcctgcacggcttct

SEQ ID NO: 4335 - skipped

SEQ ID NO: 4336 - DNA, 27 bp, synthetic construct
  misc_feature 1..27: note = Synthetic construct
  source 1..27: mol_type = other DNA
ggacaagggcttgaatggattggaggc

SEQ ID NO: 4337 - DNA, 45 bp, synthetic construct
  misc_feature 1..45: note = Synthetic construct
  source 1..45: mol_type = other DNA
gggatccggcagcccgccgggaagggactggagtggattgggcga

SEQ ID NO: 4338 - DNA, 51 bp, synthetic construct
  misc_feature 1..51: note = Synthetic construct
  source 1..51: mol_type = other DNA
accatctgggtgcgacaggcccctggacaagggcttgagtggatgggatgg

SEQ ID NO: 4339 - DNA, 51 bp, synthetic construct
  misc_feature 1..51: note = Synthetic construct
  source 1..51: mol_type = other DNA
ataaactgggtgcgacaggcccctggacaagggcttgagtggatggccata

SEQ ID NO: 4340 - DNA, 51 bp, synthetic construct
  misc_feature 1..51: note = Synthetic construct
  source 1..51: mol_type = other DNA
ataagctggctgcgacaggcccctggacaaggactcgaatggatgggagga

SEQ ID NO: 4341 - DNA, 51 bp, synthetic construct
  misc_feature 1..51: note = Synthetic construct
  source 1..51: mol_type = other DNA
atacactgggtccgccaggcccccgggaaagggctggagtgggttggccgt

SEQ ID NO: 4342 - DNA, 51 bp, synthetic construct
  misc_feature 1..51: note = Synthetic construct
  source 1..51: mol_type = other DNA
atacactgggtccgccaggctccaggcaaggggccggagtgggtggcagtt

SEQ ID NO: 4343 - DNA, 51 bp, synthetic construct
  misc_feature 1..51: note = Synthetic construct
  source 1..51: mol_type = other DNA
atacactgggtccgccaggctccaggcaaggggctggagtgggtgtcactt

SEQ ID NO: 4344 - DNA, 51 bp, synthetic construct
  misc_feature 1..51: note = Synthetic construct
  source 1..51: mol_type = other DNA
atacactgggtccgccaggcttccgggaaagggctggagtggcttgcccgt

SEQ ID NO: 4345 - DNA, 51 bp, synthetic construct
  misc_feature 1..51: note = Synthetic construct
  source 1..51: mol_type = other DNA
atacactgggtccgccaggcttccgggaaagggctggagtgggtcggccgc

SEQ ID NO: 4346 - DNA, 51 bp, synthetic construct
  misc_feature 1..51: note = Synthetic construct
  source 1..51: mol_type = other DNA
atacactgggtccgccaggcttccgggaaggggctgcagtgggttggccat

SEQ ID NO: 4347 - DNA, 51 bp, synthetic construct
  misc_feature 1..51: note = Synthetic construct
  source 1..51: mol_type = other DNA
atacactgggtgaagcaggcccctggaaaagggcttgagtggatgggacgt

SEQ ID NO: 4348 - DNA, 51 bp, synthetic construct
  misc_feature 1..51: note = Synthetic construct
  source 1..51: mol_type = other DNA
atacactgggtgcgacaggcccctggacaagggcttgactggatgggaatt

SEQ ID NO: 4349 - DNA, 51 bp, synthetic construct
  misc_feature 1..51: note = Synthetic construct
  source 1..51: mol_type = other DNA
atacactgggtgcgacaggcccctggacaagggcttgagtggatgggatgg

SEQ ID NO: 4350 - DNA, 51 bp, synthetic construct
  misc_feature 1..51: note = Synthetic construct
  source 1..51: mol_type = other DNA
atacactgggtgcgacaggcccctggacaggggcttgagtggatgggatgg

SEQ ID NO: 4351 - DNA, 51 bp, synthetic construct
  misc_feature 1..51: note = Synthetic construct
  source 1..51: mol_type = other DNA
atacagtgggtgcgacaggcccccggacaggggcttgagtggatgggatgg

SEQ ID NO: 4352 - DNA, 51 bp, synthetic construct
  misc_feature 1..51: note = Synthetic construct
  source 1..51: mol_type = other DNA
atacattggatacgacaggcccctggacaaggccttgagtggatgggttgg

SEQ ID NO: 4353 - DNA, 51 bp, synthetic construct
  misc_feature 1..51: note = Synthetic construct
  source 1..51: mol_type = other DNA
atacattggattcgacaggcccctggacaaggactggagtggatggggata

SEQ ID NO: 4354 - DNA, 51 bp, synthetic construct
  misc_feature 1..51: note = Synthetic construct
  source 1..51: mol_type = other DNA
atacattggctgcgccaggcccccggacaaagccctgaatggatgggatgg

SEQ ID NO: 4355 - DNA, 51 bp, synthetic construct
  misc_feature 1..51: note = Synthetic construct
  source 1..51: mol_type = other DNA
atacattgggtgcgactggcccctggacagagacttgagtggctggggtgg

SEQ ID NO: 4356 - DNA, 51 bp, synthetic construct
  misc_feature 1..51: note = Synthetic construct
  source 1..51: mol_type = other DNA
atacattgggtgcgccaggcccccggacaaaggcttgagtgcatgggatgg

SEQ ID NO: 4357 - DNA, 51 bp, synthetic construct
  misc_feature 1..51: note = Synthetic construct
  source 1..51: mol_type = other DNA
atacattgggtgcgccaggcccccggacaaaggcttgagtggatgggatgg

SEQ ID NO: 4358 - DNA, 51 bp, synthetic construct
  misc_feature 1..51: note = Synthetic construct
  source 1..51: mol_type = other DNA
atacattgggtgcgccaggcccccggacaaaggcttgagtggatgggttgg

SEQ ID NO: 4359 - DNA, 51 bp, synthetic construct
  misc_feature 1..51: note = Synthetic construct
  source 1..51: mol_type = other DNA
atacattgggtgcggcaggcccctggacaggggcttgagtggatgggatat

SEQ ID NO: 4360 - DNA, 51 bp, synthetic construct
  misc_feature 1..51: note = Synthetic construct
  source 1..51: mol_type = other DNA
atagactggatacaacaggcccctggaaaagggcttgagtggatgggacgt

SEQ ID NO: 4361 - DNA, 51 bp, synthetic construct
  misc_feature 1..51: note = Synthetic construct
  source 1..51: mol_type = other DNA
atatactgggtgcgacaggcccctggaaaaggacttgagtcgatgggacgt

SEQ ID NO: 4362 - DNA, 51 bp, synthetic construct
  misc_feature 1..51: note = Synthetic construct
  source 1..51: mol_type = other DNA
atatattgggtgcgccaggcccccggacaaaggcttgagtggatgggatgg

SEQ ID NO: 4363 - DNA, 51 bp, synthetic construct
  misc_feature 1..51: note = Synthetic construct
  source 1..51: mol_type = other DNA
atcaactgggtgcgacaggccactggacaagggcttgagtggatgggatac

SEQ ID NO: 4364 - DNA, 51 bp, synthetic construct
  misc_feature 1..51: note = Synthetic construct
  source 1..51: mol_type = other DNA
atcaactgggtgcgacaggccactggacaagggcttgagtggatgggatgg

SEQ ID NO: 4365 - DNA, 51 bp, synthetic construct
  misc_feature 1..51: note = Synthetic construct
  source 1..51: mol_type = other DNA
atcaactgggtgcgacaggccactggacaagggcttgagtgggtgggatgg

SEQ ID NO: 4366 - DNA, 51 bp, synthetic construct
  misc_feature 1..51: note = Synthetic construct
  source 1..51: mol_type = other DNA
atcaactgggtgcgacaggccactggacaagggcttgtctggatgggatgg

SEQ ID NO: 4367 - DNA, 51 bp, synthetic construct
  misc_feature 1..51: note = Synthetic construct
  source 1..51: mol_type = other DNA
atcaactgggtgcgacaggccagtggacaggggcttgagtggatgggatgg

SEQ ID NO: 4368 - DNA, 51 bp, synthetic construct
  misc_feature 1..51: note = Synthetic construct
  source 1..51: mol_type = other DNA
atcaactgggtgcgacaggcccctggacaagaacttgagtggatgggaggc

SEQ ID NO: 4369 - DNA, 51 bp, synthetic construct
  misc_feature 1..51: note = Synthetic construct
  source 1..51: mol_type = other DNA
atcaactgggtgcgacaggcccctggacaagggcttgagtggatgggaggg

SEQ ID NO: 4370 - DNA, 51 bp, synthetic construct
  misc_feature 1..51: note = Synthetic construct
  source 1..51: mol_type = other DNA
atcaactgggtgcgacaggcccctggacaagggcttgagtggatgggatgg

SEQ ID NO: 4371 - DNA, 51 bp, synthetic construct
  misc_feature 1..51: note = Synthetic construct
  source 1..51: mol_type = other DNA
atcaactgggtgcgacaggcccctggacaaggtcttgagtggatgggaggg

SEQ ID NO: 4372 - DNA, 51 bp, synthetic construct; identical to SEQ ID NO: 1784
  misc_feature 1..51: note = Synthetic construct
  source 1..51: mol_type = other DNA

SEQ ID NO: 4373 - DNA, 51 bp, synthetic construct
  misc_feature 1..51: note = Synthetic construct
  source 1..51: mol_type = other DNA
atcaattgggtgcgacaggcccctggacaaggacttgagtttatgggatgg

SEQ ID NO: 4374 - DNA, 51 bp, synthetic construct
  misc_feature 1..51: note = Synthetic construct
  source 1..51: mol_type = other DNA
atcacctgggtgcgacaggcccctggacaagggcttgagtggatgggaaag

SEQ ID NO: 4375 - DNA, 51 bp, synthetic construct
  misc_feature 1..51: note = Synthetic construct
  source 1..51: mol_type = other DNA
atcacctgggtgcgacaggcccctggacaagggcttgagtggatgggaggg

SEQ ID NO: 4376 - DNA, 51 bp, synthetic construct
  misc_feature 1..51: note = Synthetic construct
  source 1..51: mol_type = other DNA
atcacctgggtgcgacaggcccctggacaagggcttgagtggatgggatgg

SEQ ID NO: 4377 - DNA, 51 bp, synthetic construct
  misc_feature 1..51: note = Synthetic construct
  source 1..51: mol_type = other DNA
atcacctgggtgcgacaggcccctggacaagggcttgagtggatgggtggg

SEQ ID NO: 4378 - DNA, 51 bp, synthetic construct
  misc_feature 1..51: note = Synthetic construct
  source 1..51: mol_type = other DNA
atcacctgggtgcgacaggcccctggacaggggcttgagtggatgggatgg

SEQ ID NO: 4379 - DNA, 51 bp, synthetic construct
  misc_feature 1..51: note = Synthetic construct
  source 1..51: mol_type = other DNA
atcacctgggtgcgacaggcccctggacaggggcttgagtggctgggatgg

SEQ ID NO: 4380 - DNA, 51 bp, synthetic construct
  misc_feature 1..51: note = Synthetic construct
  source 1..51: mol_type = other DNA
atcacgtgggtgcgacaggcccctggacaacggcctgagtggatggggggg

SEQ ID NO: 4381 - DNA, 51 bp, synthetic construct
  misc_feature 1..51: note = Synthetic construct
  source 1..51: mol_type = other DNA
atcacttgggtccgacaggcacctggacagggactggaatggatgggagga

SEQ ID NO: 4382 - DNA, 51 bp, synthetic construct
  misc_feature 1..51: note = Synthetic construct
  source 1..51: mol_type = other DNA
atcagctgggtgcgacaggcccccggccaagggcttgagtggatgggaggg

SEQ ID NO: 4383 - DNA, 51 bp, synthetic construct
  misc_feature 1..51: note = Synthetic construct
  source 1..51: mol_type = other DNA
atcagctgggtgcgacaggcccctggacaaggccttgagtggatgggatgg

SEQ ID NO: 4384 - DNA, 51 bp, synthetic construct
  misc_feature 1..51: note = Synthetic construct
  source 1..51: mol_type = other DNA
atcagctgggtgcgacaggcccctggacaagggctcgagtggatgggaggg

SEQ ID NO: 4385 - DNA, 51 bp, synthetic construct
  misc_feature 1..51: note = Synthetic construct
  source 1..51: mol_type = other DNA
atcagctgggtgcgacaggcccctggacaagggcttcagtggatgggaggg

SEQ ID NO: 4386 - DNA, 51 bp, synthetic construct
  misc_feature 1..51: note = Synthetic construct
  source 1..51: mol_type = other DNA
atcagctgggtgcgacaggcccctggacaagggcttgagtggatgggaggg

SEQ ID NO: 4387 - DNA, 51 bp, synthetic construct
  misc_feature 1..51: note = Synthetic construct
  source 1..51: mol_type = other DNA
atcagctgggtgcgacaggcccctggacaagggcttgagtggatgggatgg

SEQ ID NO: 4388 - DNA, 51 bp, synthetic construct
  misc_feature 1..51: note = Synthetic construct
  source 1..51: mol_type = other DNA
atcagctgggtgcgacaggcccctggacaagggcttgagtgggtgggatgg

SEQ ID NO: 4389 - DNA, 51 bp, synthetic construct
  misc_feature 1..51: note = Synthetic construct
  source 1..51: mol_type = other DNA
atcagctgggtgcgacaggcccctggacaaggtcttgagtggatgggaggg

SEQ ID NO: 4390 - DNA, 51 bp, synthetic construct
  misc_feature 1..51: note = Synthetic construct
  source 1..51: mol_type = other DNA
atcagctgggtgcgacaggcccctggacaaggtcttgagtggatgggatgg

SEQ ID NO: 4391 - DNA, 51 bp, synthetic construct
  misc_feature 1..51: note = Synthetic construct
  source 1..51: mol_type = other DNA
atcagctgggtgcgacaggcccctggacaggggcttgagtggatgggaaac

SEQ ID NO: 4392 - DNA, 51 bp, synthetic construct
  misc_feature 1..51: note = Synthetic construct
  source 1..51: mol_type = other DNA
atcagctgggtgcgacaggcccctggacaggggcttgagtggctgggaggg

SEQ ID NO: 4393 - DNA, 51 bp, synthetic construct
  misc_feature 1..51: note = Synthetic construct
  source 1..51: mol_type = other DNA
atcagctgggtgcgacaggcccctgggcaagggcttgagtggatgggatgg

SEQ ID NO: 4394 - DNA, 51 bp, synthetic construct
  misc_feature 1..51: note = Synthetic construct
  source 1..51: mol_type = other DNA
atcagctgggtgcgacaggtccctggacaagggcttgagtggatgggaggg

SEQ ID NO: 4395 - DNA, 51 bp, synthetic construct
  misc_feature 1..51: note = Synthetic construct
  source 1..51: mol_type = other DNA
atcagctgggtgcgccaggcccccggacaagggcttgagtggatgggagga

SEQ ID NO: 4396 - DNA, 51 bp, synthetic construct
  misc_feature 1..51: note = Synthetic construct
  source 1..51: mol_type = other DNA
atcagctgggtgcggcaggcccctggacaagggcttgagtggctgggctgg

SEQ ID NO: 4397 - DNA, 51 bp, synthetic construct
  misc_feature 1..51: note = Synthetic construct
  source 1..51: mol_type = other DNA
atcagctgggtgcgtcaggcccctggacgagggcttgaatggatgggaggg

SEQ ID NO: 4398 - DNA, 51 bp, synthetic construct
  misc_feature 1..51: note = Synthetic construct
  source 1..51: mol_type = other DNA
atcagttgggtgcgacaggcccctggacaagggcttgagtggatgggatgg

SEQ ID NO: 4399 - DNA, 51 bp, synthetic construct
  misc_feature 1..51: note = Synthetic construct
  source 1..51: mol_type = other DNA
atcatctgggtgcggcaggcccctggacaaggccttgagtggatgggagga

SEQ ID NO: 4400 - DNA, 51 bp, synthetic construct
  misc_feature 1..51: note = Synthetic construct
  source 1..51: mol_type = other DNA
atcatgtgggtccgacaggcccctggagaaggacttcagtggatgggatgg

SEQ ID NO: 4401 - DNA, 51 bp, synthetic construct
  misc_feature 1..51: note = Synthetic construct
  source 1..51: mol_type = other DNA
atccactggattcaacaggcccctggaaaacgacctgagtggatggcacgt

SEQ ID NO: 4402 - DNA, 51 bp, synthetic construct
  misc_feature 1..51: note = Synthetic construct
  source 1..51: mol_type = other DNA
atccactgggtccgccaggctcccggcagggggctggagtgggtggcagtt

SEQ ID NO: 4403 - DNA, 51 bp, synthetic construct
  misc_feature 1..51: note = Synthetic construct
  source 1..51: mol_type = other DNA
atccactgggtgcaacaggcccctggaaaagggcttgagtggatgggacgc

SEQ ID NO: 4404 - DNA, 51 bp, synthetic construct
  misc_feature 1..51: note = Synthetic construct
  source 1..51: mol_type = other DNA
atccactgggtgcgacaggcccctggacaagggcttgagtggatgggaggg

SEQ ID NO: 4405 - DNA, 51 bp, synthetic construct
  misc_feature 1..51: note = Synthetic construct
  source 1..51: mol_type = other DNA
atccactgggtgcgacaggcccctggacaagggcttgagtggatgggagta

SEQ ID NO: 4406 - DNA, 51 bp, synthetic construct
  misc_feature 1..51: note = Synthetic construct
  source 1..51: mol_type = other DNA
atccactgggtgcgacaggcccctggacaggggcttgagtggatgggatgg

SEQ ID NO: 4407 - DNA, 51 bp, synthetic construct
  misc_feature 1..51: note = Synthetic construct
  source 1..51: mol_type = other DNA
atccactgggtgcgacaggcccctggactagggcttgagtggctgggatgg

SEQ ID NO: 4408 - DNA, 51 bp, synthetic construct
  misc_feature 1..51: note = Synthetic construct
  source 1..51: mol_type = other DNA
atccactgggtgcgacaggctcctggaaaagggcttgagtggatgggaggt

SEQ ID NO: 4409 - DNA, 51 bp, synthetic construct
  misc_feature 1..51: note = Synthetic construct
  source 1..51: mol_type = other DNA
atccactgggtgcgacaggctcctggaaaagggcttgagtggatggggggt

SEQ ID NO: 4410 - DNA, 51 bp, synthetic construct
  misc_feature 1..51: note = Synthetic construct
  source 1..51: mol_type = other DNA
atccactgggtgcgacaggtcactggacaagggcttgagtggctgggatgc

SEQ ID NO: 4411 - DNA, 51 bp, synthetic construct
  misc_feature 1..51: note = Synthetic construct
  source 1..51: mol_type = other DNA
atccactgggtgcggcaggcccctggacaggggcttgagtggatgggaata

SEQ ID NO: 4412 - DNA, 51 bp, synthetic construct
  misc_feature 1..51: note = Synthetic construct
  source 1..51: mol_type = other DNA
atccattgggtgcgacgggcccctggacaaggtcttgagtggatggggtgg

SEQ ID NO: 4413 - DNA, 51 bp, synthetic construct
  misc_feature 1..51: note = Synthetic construct
  source 1..51: mol_type = other DNA
atccattgggtgcgccaggcccccggagaaaggcttgagtggatgggatac

SEQ ID NO: 4414 - DNA, 51 bp, synthetic construct
  misc_feature 1..51: note = Synthetic construct
  source 1..51: mol_type = other DNA
atcgcctgggtgcgccagatgcccgggaaaggcctggagtggatggggatc

SEQ ID NO: 4415 - DNA, 51 bp, synthetic construct
  misc_feature 1..51: note = Synthetic construct
  source 1..51: mol_type = other DNA
atcgcctgggtgcgccagatgcccgggaaaggcctggagtggatgggggtc

SEQ ID NO: 4416 - DNA, 51 bp, synthetic construct
  misc_feature 1..51: note = Synthetic construct
  source 1..51: mol_type = other DNA
atcgcctgggtgcgccaggtgtccgggaaaggcctggagtggatgggggtc

SEQ ID NO: 4417 - DNA, 51 bp, synthetic construct
  misc_feature 1..51: note = Synthetic construct
  source 1..51: mol_type = other DNA
atcggctgggtacgccagatgcccgggaaaggcccggagtggatggggatc

SEQ ID NO: 4418 - DNA, 51 bp, synthetic construct
  misc_feature 1..51: note = Synthetic construct
  source 1..51: mol_type = other DNA
atcggctgggtgcgccaagtgcccgggaaaggcctggagtggatggcgatc

SEQ ID NO: 4419 - DNA, 51 bp, synthetic construct
  misc_feature 1..51: note = Synthetic construct
  source 1..51: mol_type = other DNA
atcggctgggtgcgccagaagcccgggaaaggcctggagtggatggggatc

SEQ ID NO: 4420 - DNA, 51 bp, synthetic construct
  misc_feature 1..51: note = Synthetic construct
  source 1..51: mol_type = other DNA
atcggctgggtgcgccagaagcccggggagaccctggagttgatgggggtc

SEQ ID NO: 4421 - DNA, 51 bp, synthetic construct
  misc_feature 1..51: note = Synthetic construct
  source 1..51: mol_type = other DNA
atcggctgggtgcgccagatgcccggaaaaggcctggagtggatgggtatc

SEQ ID NO: 4422 - DNA, 51 bp, synthetic construct
  misc_feature 1..51: note = Synthetic construct
  source 1..51: mol_type = other DNA
atcggctgggtgcgccagatgcccgggaaaggcctggagtggataggaaat

SEQ ID NO: 4423 - DNA, 51 bp, synthetic construct
  misc_feature 1..51: note = Synthetic construct
  source 1..51: mol_type = other DNA
atcggctgggtgcgccagatgcccgggaaaggcctggagtggatggcaatg

SEQ ID NO: 4424 - DNA, 51 bp, synthetic construct
  misc_feature 1..51: note = Synthetic construct
  source 1..51: mol_type = other DNA
atcggctgggtgcgccagatgcccgggaaaggcctggagtggatggccatc

SEQ ID NO: 4425 - DNA, 51 bp, synthetic construct
  misc_feature 1..51: note = Synthetic construct
  source 1..51: mol_type = other DNA
atcggctgggtgcgccagatgcccgggaaaggcctggagtggatgggaatc

SEQ ID NO: 4426 - DNA, 51 bp, synthetic construct
  misc_feature 1..51: note = Synthetic construct
  source 1..51: mol_type = other DNA
atcggctgggtgcgccagatgcccgggaaaggcctggagtggatggggacc

SEQ ID NO: 4427 - DNA, 51 bp, synthetic construct
  misc_feature 1..51: note = Synthetic construct
  source 1..51: mol_type = other DNA
atcggctgggtgcgccagatgcccgggaaaggcctggagtggatggggatc

SEQ ID NO: 4428 - DNA, 51 bp, synthetic construct
  misc_feature 1..51: note = Synthetic construct
  source 1..51: mol_type = other DNA
atcggctgggtgcgccagatgcccggggaaggcctggagtggatggggatc

SEQ ID NO: 4429 - DNA, 51 bp, synthetic construct
  misc_feature 1..51: note = Synthetic construct
  source 1..51: mol_type = other DNA
atcggttgggtgcgccagatgcccgggaaacgcctggagtggatgggagtc

SEQ ID NO: 4430 - DNA, 51 bp, synthetic construct
  misc_feature 1..51: note = Synthetic construct
  source 1..51: mol_type = other DNA
atcgtctgggtgcgccagatgcccggaaaagggctggagtggatgggagtc

SEQ ID NO: 4431 - DNA, 51 bp, synthetic construct
  misc_feature 1..51: note = Synthetic construct
  source 1..51: mol_type = other DNA
atcgtctgggtgcgccagatgcccgggaaaggcctggagtggatggggatc

SEQ ID NO: 4432 - DNA, 51 bp, synthetic construct
  misc_feature 1..51: note = Synthetic construct
  source 1..51: mol_type = other DNA
atcgtctgggtgcgccagatgtccgggaaaggcctggagtggatgggagtc

SEQ ID NO: 4433 - DNA, 51 bp, synthetic construct
  misc_feature 1..51: note = Synthetic construct
  source 1..51: mol_type = other DNA
atctactgggtgcgccgggcccccggacaaaggcttgagtggatgggatgg

SEQ ID NO: 4434 - DNA, 51 bp, synthetic construct
  misc_feature 1..51: note = Synthetic construct
  source 1..51: mol_type = other DNA
atctcgtgggtgcgacaggccccgacacagggtcttgagtggatgggaggg

SEQ ID NO: 4435 - DNA, 51 bp, synthetic construct
  misc_feature 1..51: note = Synthetic construct
  source 1..51: mol_type = other DNA
atgaactgggtccgccaagctccagggaagggcctggagtggatttcatac

SEQ ID NO: 4436 - DNA, 51 bp, synthetic construct
  misc_feature 1..51: note = Synthetic construct
  source 1..51: mol_type = other DNA
atgaactgggtccgccagactccagggaaggggctggagtgggtctcaggt

SEQ ID NO: 4437 - DNA, 51 bp, synthetic construct
  misc_feature 1..51: note = Synthetic construct
  source 1..51: mol_type = other DNA
atgaactgggtccgccagactccagggatgggactggagtgggtttcatat

SEQ ID NO: 4438 - DNA, 51 bp, synthetic construct
  misc_feature 1..51: note = Synthetic construct
  source 1..51: mol_type = other DNA
atgaactgggtccgccaggcgccagggaaggggctggagtgggttggccgt

SEQ ID NO: 4439 - DNA, 51 bp, synthetic construct
  misc_feature 1..51: note = Synthetic construct
  source 1..51: mol_type = other DNA
atgaactgggtccgccaggctccagggaagggactggagtgggtctcatac

SEQ ID NO: 4440 - DNA, 51 bp, synthetic construct
  misc_feature 1..51: note = Synthetic construct
  source 1..51: mol_type = other DNA
atgaactgggtccgccaggctccagggaagggactggagtgggtctcatcc

SEQ ID NO: 4441 - DNA, 51 bp, synthetic construct
  misc_feature 1..51: note = Synthetic construct
  source 1..51: mol_type = other DNA
atgaactgggtccgccaggctccagggaaggggctagagtgggtctcaggt

SEQ ID NO: 4442 - DNA, 51 bp, synthetic construct
  misc_feature 1..51: note = Synthetic construct
  source 1..51: mol_type = other DNA
atgaactgggtccgccaggctccagggaaggggctggagtggatttcatac

SEQ ID NO: 4443 - DNA, 51 bp, synthetic construct
  misc_feature 1..51: note = Synthetic construct
  source 1..51: mol_type = other DNA
atgaactgggtccgccaggctccagggaaggggctggagtgggtctcaatt

SEQ ID NO: 4444 - DNA, 51 bp, synthetic construct
  misc_feature 1..51: note = Synthetic construct
  source 1..51: mol_type = other DNA
atgaactgggtccgccaggctccagggaaggggctggagtgggtctcaggt

SEQ ID NO: 4445 - DNA, 51 bp, synthetic construct
  misc_feature 1..51: note = Synthetic construct
  source 1..51: mol_type = other DNA
atgaactgggtccgccaggctccagggaaggggctggagtgggtctcatat

SEQ ID NO: 4446 - DNA, 51 bp, synthetic construct
  misc_feature 1..51: note = Synthetic construct
  source 1..51: mol_type = other DNA
atgaactgggtccgccaggctccagggaaggggctggagtgggtctcatca

SEQ ID NO: 4447 - DNA, 51 bp, synthetic construct
  misc_feature 1..51: note = Synthetic construct
  source 1..51: mol_type = other DNA
atgaactgggtccgccaggctccagggaaggggctggagtgggtctcatcc

SEQ ID NO: 4448 - DNA, 51 bp, synthetic construct
  misc_feature 1..51: note = Synthetic construct
  source 1..51: mol_type = other DNA
atgaactgggtccgccaggctccagggaaggggctggagtgggtctcattc

SEQ ID NO: 4449 - DNA, 51 bp, synthetic construct
  misc_feature 1..51: note = Synthetic construct
  source 1..51: mol_type = other DNA
atgaactgggtccgccaggctccagggaaggggctggagtgggtttcatac

SEQ ID NO: 4450 - DNA, 51 bp, synthetic construct
  misc_feature 1..51: note = Synthetic construct
  source 1..51: mol_type = other DNA
atgaactgggtccgccaggctccagggaggggcctggagtgggtcgcaacc

SEQ ID NO: 4451 - DNA, 51 bp, synthetic construct
  misc_feature 1..51: note = Synthetic construct
  source 1..51: mol_type = other DNA
atgaactgggtccgccaggctccagggagggggctggagtgggtctcacat

SEQ ID NO: 4452 - DNA, 51 bp, synthetic construct
  misc_feature 1..51: note = Synthetic construct
  source 1..51: mol_type = other DNA
atgaactgggtccgccaggctccagggatggggctggagtgggtttcatac

SEQ ID NO: 4453 - DNA, 51 bp, synthetic construct
  misc_feature 1..51: note = Synthetic construct
  source 1..51: mol_type = other DNA
atgaactgggtccgccaggctccaggggaggggctggagtggattgcatac

SEQ ID NO: 4454 - DNA, 51 bp, synthetic construct
  misc_feature 1..51: note = Synthetic construct
  source 1..51: mol_type = other DNA
atgaactgggtccgccaggctccgggggaggggctggagtgggtttcattc

SEQ ID NO: 4455 - DNA, 51 bp, synthetic construct
  misc_feature 1..51: note = Synthetic construct
  source 1..51: mol_type = other DNA
atgaactgggtccgccaggctgcagggaaggggctggagtgggtttcatat

SEQ ID NO: 4456 - DNA, 51 bp, synthetic construct
  misc_feature 1..51: note = Synthetic construct
  source 1..51: mol_type = other DNA
atgaactgggtccgccaggttccagggaaggggctggagtgggtctcatcc

SEQ ID NO: 4457 - DNA, 51 bp, synthetic construct
  misc_feature 1..51: note = Synthetic construct
  source 1..51: mol_type = other DNA
atgaactgggtccgccggactccagagaagggcctggagtgggtcgcatcc

SEQ ID NO: 4458 - DNA, 51 bp, synthetic construct
  misc_feature 1..51: note = Synthetic construct
  source 1..51: mol_type = other DNA
atgaactgggtccgctgggctccagggaaggggctggagtgggtcgcatcc

SEQ ID NO: 4459 - DNA, 51 bp, synthetic construct
  misc_feature 1..51: note = Synthetic construct
  source 1..51: mol_type = other DNA
atgaactgggtgcgacaggcccctggacaagggcttgagtggatgggatgg

SEQ ID NO: 4460 - DNA, 51 bp, synthetic construct
  misc_feature 1..51: note = Synthetic construct
  source 1..51: mol_type = other DNA
atgaagtggatccgccaggctccagggaaggggctggagtgggtttcatac

SEQ ID NO: 4461 - DNA, 51 bp, synthetic construct
  misc_feature 1..51: note = Synthetic construct
  source 1..51: mol_type = other DNA
atgaattggattcgccaggctccagggaaggggctggagtggctttcatat

SEQ ID NO: 4462 - DNA, 51 bp, synthetic construct
  misc_feature 1..51: note = Synthetic construct
  source 1..51: mol_type = other DNA
atgaattgggtccgccagactccagggaaggggctggagtgggtctcgtcc

SEQ ID NO: 4463 - DNA, 51 bp, synthetic construct
  misc_feature 1..51: note = Synthetic construct
  source 1..51: mol_type = other DNA
atgaattgggtccgccaggctccagggaagggactggagtgggtcgcttcc

SEQ ID NO: 4464 - DNA, 51 bp, synthetic construct
  misc_feature 1..51: note = Synthetic construct
  source 1..51: mol_type = other DNA
atgaattgggtccgccaggctccagggaaggggctggaatgggtctcatac

SEQ ID NO: 4465 - DNA, 51 bp, synthetic construct
  misc_feature 1..51: note = Synthetic construct
  source 1..51: mol_type = other DNA
atgaattgggtccgccaggctccagggaggggactggagtggatttcatac

SEQ ID NO: 4466 - DNA, 51 bp, synthetic construct
  misc_feature 1..51: note = Synthetic construct
  source 1..51: mol_type = other DNA
atgaattgggtccgccaggctccagggagggggctgcagtggcttgcattc

SEQ ID NO: 4467 - DNA, 51 bp, synthetic construct
  misc_feature 1..51: note = Synthetic construct
  source 1..51: mol_type = other DNA
atgaattgggtccgccaggctccagggcaggggctggactgggtcggccgt

SEQ ID NO: 4468 - DNA, 51 bp, synthetic construct
  misc_feature 1..51: note = Synthetic construct
  source 1..51: mol_type = other DNA
atgaattgggtccgccagtctccagggaaggggctggagtgggtttcatac

SEQ ID NO: 4469 - DNA, 51 bp, synthetic construct
  misc_feature 1..51: note = Synthetic construct
  source 1..51: mol_type = other DNA
atgaattgggtccgtcaggctccagggaaggggctagagtgggtcgcatcc

SEQ ID NO: 4470 - DNA, 51 bp, synthetic construct
  misc_feature 1..51: note = Synthetic construct
  source 1..51: mol_type = other DNA
atgaattgggtgcgacaggcccctggacaagggcttgagtggatgggatgg

SEQ ID NO: 4471 - DNA, 51 bp, synthetic construct
  misc_feature 1..51: note = Synthetic construct
  source 1..51: mol_type = other DNA
atgaattgggtgcgacaggtccctggacaagggcttgagtggatgggatgg

SEQ ID NO: 4472 - DNA, 51 bp, synthetic construct
  misc_feature 1..51: note = Synthetic construct
  source 1..51: mol_type = other DNA
atgaattgggtgcggcaggcccctgggcaagggcttgagtggatgggatgg

SEQ ID NO: 4473 - DNA, 51 bp, synthetic construct
  misc_feature 1..51: note = Synthetic construct
  source 1..51: mol_type = other DNA
atgacctgggtccgccaagctccagggaagggcctggagtgggtcgctggt

SEQ ID NO: 4474 - DNA, 51 bp, synthetic construct
  misc_feature 1..51: note = Synthetic construct
  source 1..51: mol_type = other DNA
atgacctgggtccgccaagttccagggaaggggctgcagtgggtcgctggc

SEQ ID NO: 4475 - DNA, 51 bp, synthetic construct
  misc_feature 1..51: note = Synthetic construct
  source 1..51: mol_type = other DNA
atgacctgggtccgccacgctgcagggaaggggctgcagtgggtctcagtt

SEQ ID NO: 4476 - DNA, 51 bp, synthetic construct
  misc_feature 1..51: note = Synthetic construct
  source 1..51: mol_type = other DNA
atgacctgggtccgccaggctccaggaaaggggctggagtgggtctcaact

SEQ ID NO: 4477 - DNA, 51 bp, synthetic construct
  misc_feature 1..51: note = Synthetic construct
  source 1..51: mol_type = other DNA
atgacctgggtccgccaggctccagggaagggactggagtgggtaggtttc

SEQ ID NO: 4478 - DNA, 51 bp, synthetic construct
  misc_feature 1..51: note = Synthetic construct
  source 1..51: mol_type = other DNA
atgacctgggtccgccaggctccagggaaggggccggagtgggtctcaagt

SEQ ID NO: 4479 - DNA, 51 bp, synthetic construct
  misc_feature 1..51: note = Synthetic construct
  source 1..51: mol_type = other DNA
atgacctgggtccgccaggctccagggaaggggctggaatgggtctcagtt

SEQ ID NO: 4480 - DNA, 51 bp, synthetic construct
  misc_feature 1..51: note = Synthetic construct
  source 1..51: mol_type = other DNA
atgacctgggtccgccaggctccagggaaggggctggagtggatggcctgc

SEQ ID NO: 4481 - DNA, 51 bp, synthetic construct
  misc_feature 1..51: note = Synthetic construct
  source 1..51: mol_type = other DNA
atgacctgggtccgccaggctccagggaaggggctggagtgggtctcaact

SEQ ID NO: 4482 - DNA, 51 bp, synthetic construct
  misc_feature 1..51: note = Synthetic construct
  source 1..51: mol_type = other DNA
atgacctgggtccgccaggctccagggaaggggctggagtgggtctcaagc

SEQ ID NO: 4483 - DNA, 51 bp, synthetic construct
  misc_feature 1..51: note = Synthetic construct
  source 1..51: mol_type = other DNA
atgacctgggtccgccaggctccagggaaggggctggagtgggtctcaagt

SEQ ID NO: 4484 - DNA, 51 bp, synthetic construct
  misc_feature 1..51: note = Synthetic construct
  source 1..51: mol_type = other DNA
atgacctgggtccgccaggctccagggaaggggctggagtgggtctcagct

SEQ ID NO: 4485 - DNA, 51 bp, synthetic construct
  misc_feature 1..51: note = Synthetic construct
  source 1..51: mol_type = other DNA
atgacctgggtccgccaggctccagggaaggggctggagtgggtggccaac

SEQ ID NO: 4486 - DNA, 51 bp, synthetic construct
  misc_feature 1..51: note = Synthetic construct
  source 1..51: mol_type = other DNA
atgacctgggtccgccaggctccagggaaggggctggagtgggtttcacac

SEQ ID NO: 4487 - DNA, 51 bp, synthetic construct
  misc_feature 1..51: note = Synthetic construct
  source 1..51: mol_type = other DNA
atgacctgggtccgccaggctcccgggaaggggctggagtgggtaggtctc

SEQ ID NO: 4488 - DNA, 51 bp, synthetic construct
  misc_feature 1..51: note = Synthetic construct
  source 1..51: mol_type = other DNA
atgacctgggtccgccaggttccagggaaggggctggagtgggtctcagtt

SEQ ID NO: 4489 - DNA, 51 bp, synthetic construct
  misc_feature 1..51: note = Synthetic construct
  source 1..51: mol_type = other DNA
atgacgtgggtccgccaggctccagggaaggggctggagctgctgggcaac

SEQ ID NO: 4490 - DNA, 51 bp, synthetic construct
  misc_feature 1..51: note = Synthetic construct
  source 1..51: mol_type = other DNA
atgacgtgggtccgccaggctcccgggaaggggctggagtgggtaggtctc

SEQ ID NO: 4491 - DNA, 51 bp, synthetic construct
  misc_feature 1..51: note = Synthetic construct
  source 1..51: mol_type = other DNA
atgacgtgggtgcgccagactcaagggaagaggctggaatgggtggccagc

SEQ ID NO: 4492 - DNA, 51 bp, synthetic construct
  misc_feature 1..51: note = Synthetic construct
  source 1..51: mol_type = other DNA
atgacttggatccgccaggctccagggaagggcctggagtgggttgcgtac

SEQ ID NO: 4493 - DNA, 51 bp, synthetic construct
  misc_feature 1..51: note = Synthetic construct
  source 1..51: mol_type = other DNA
atgacttggatccgccaggctccagggaaggggctggagtggatttcatat

SEQ ID NO: 4494 - DNA, 51 bp, synthetic construct
  misc_feature 1..51: note = Synthetic construct
  source 1..51: mol_type = other DNA
atgacttgggtccgccaggcgccagggaaggggctggagtgggtcgcaagt

SEQ ID NO: 4495 - DNA, 51 bp, synthetic construct
  misc_feature 1..51: note = Synthetic construct
  source 1..51: mol_type = other DNA
atgacttgggtccgcgagactccagggaaggggctggagtgggtctcaggt

SEQ ID NO: 4496 - DNA, 51 bp, synthetic construct
  misc_feature 1..51: note = Synthetic construct
  source 1..51: mol_type = other DNA
atgagctggatccgccaggctccagggaaggggctggagtgggtctcatac

SEQ ID NO: 4497 - DNA, 51 bp, synthetic construct
  misc_feature 1..51: note = Synthetic construct
  source 1..51: mol_type = other DNA
atgagctggatccgccaggctccagggaaggggctggagtgggtttcatac

SEQ ID NO: 4498 - DNA, 51 bp, synthetic construct
  misc_feature 1..51: note = Synthetic construct
  source 1..51: mol_type = other DNA
atgagctggatccgccaggctccagggaaggggttggagtggctttcatat

SEQ ID NO: 4499 - DNA, 51 bp, synthetic construct
  misc_feature 1..51: note = Synthetic construct
  source 1..51: mol_type = other DNA
atgagctggatccgccaggctccggggaaggggctggagtgggtgtcatac

SEQ ID NO: 4500 - DNA, 51 bp, synthetic construct
  misc_feature 1..51: note = Synthetic construct
  source 1..51: mol_type = other DNA
atgagctggattcgccaggctccagggaaggggctggagtgggtttcatac

SEQ ID NO: 4501 - DNA, 51 bp, synthetic construct
  misc_feature 1..51: note = Synthetic construct
  source 1..51: mol_type = other DNA
atgagctgggtccgccaagttccagggaaggggctggagtgggtctctggt

SEQ ID NO: 4502 - DNA, 51 bp, synthetic construct
  misc_feature 1..51: note = Synthetic construct
  source 1..51: mol_type = other DNA
atgagctgggtccgccagactccaggcaagggactggagtgggtcgcaact

SEQ ID NO: 4503 - DNA, 51 bp, synthetic construct
  misc_feature 1..51: note = Synthetic construct
  source 1..51: mol_type = other DNA
atgagctgggtccgccaggctccagggaaggggctcgagtgggtctcaggt

SEQ ID NO: 4504 - DNA, 51 bp, synthetic construct
  misc_feature 1..51: note = Synthetic construct
  source 1..51: mol_type = other DNA
atgagctgggtccgccaggctccagggaaggggctggaatggatctcaggt

SEQ ID NO: 4505 - DNA, 51 bp, synthetic construct
  misc_feature 1..51: note = Synthetic construct
  source 1..51: mol_type = other DNA
atgagctgggtccgccaggctccagggaaggggctggagtggatctcaggt

SEQ ID NO: 4506 - DNA, 51 bp, synthetic construct
  misc_feature 1..51: note = Synthetic construct
  source 1..51: mol_type = other DNA
atgagctgggtccgccaggctccagggaaggggctggagtggattggtcgt

SEQ ID NO: 4507 - DNA, 51 bp, synthetic construct
  misc_feature 1..51: note = Synthetic construct
  source 1..51: mol_type = other DNA
atgagctgggtccgccaggctccagggaaggggctggagtgggtaggttta

SEQ ID NO: 4508 - DNA, 51 bp, synthetic construct
  misc_feature 1..51: note = Synthetic construct
  source 1..51: mol_type = other DNA
atgagctgggtccgccaggctccagggaaggggctggagtgggtaggtttc

SEQ ID NO: 4509 - DNA, 51 bp, synthetic construct
  misc_feature 1..51: note = Synthetic construct
  source 1..51: mol_type = other DNA
atgagctgggtccgccaggctccagggaaggggctggagtgggtcgcagtt

SEQ ID NO: 4510 - DNA, 51 bp, synthetic construct
  misc_feature 1..51: note = Synthetic construct
  source 1..51: mol_type = other DNA
atgagctgggtccgccaggctccagggaaggggctggagtgggtctcaact

SEQ ID NO: 4511 - DNA, 51 bp, synthetic construct
  misc_feature 1..51: note = Synthetic construct
  source 1..51: mol_type = other DNA
atgagctgggtccgccaggctccagggaaggggctggagtgggtctcaagt

SEQ ID NO: 4512 - DNA, 51 bp, synthetic construct
  misc_feature 1..51: note = Synthetic construct
  source 1..51: mol_type = other DNA
atgagctgggtccgccaggctccagggaaggggctggagtgggtctcacat

SEQ ID NO: 4513 - DNA, 51 bp, synthetic construct
  misc_feature 1..51: note = Synthetic construct
  source 1..51: mol_type = other DNA
atgagctgggtccgccaggctccagggaaggggctggagtgggtctcagcc

SEQ ID NO: 4514 - DNA, 51 bp, synthetic construct
  misc_feature 1..51: note = Synthetic construct
  source 1..51: mol_type = other DNA
atgagctgggtccgccaggctccagggaaggggctggagtgggtctcagct

SEQ ID NO: 4515 - DNA, 51 bp, synthetic construct
  misc_feature 1..51: note = Synthetic construct
  source 1..51: mol_type = other DNA
atgagctgggtccgccaggctccagggaaggggctggagtgggtctcaggt

SEQ ID NO: 4516 - DNA, 51 bp, synthetic construct
  misc_feature 1..51: note = Synthetic construct
  source 1..51: mol_type = other DNA
atgagctgggtccgccaggctccagggaaggggctggagtgggtctcagtt

SEQ ID NO: 4517 - DNA, 51 bp, synthetic construct; identical to SEQ ID NO: 1783
  misc_feature 1..51: note = Synthetic construct
  source 1..51: mol_type = other DNA

SEQ ID NO: 4518 - DNA, 51 bp, synthetic construct
  misc_feature 1..51: note = Synthetic construct
  source 1..51: mol_type = other DNA
atgagctgggtccgccaggctccagggaaggggctggagtgggtggccaac

SEQ ID NO: 4519 - DNA, 51 bp, synthetic construct
  misc_feature 1..51: note = Synthetic construct
  source 1..51: mol_type = other DNA
atgagctgggtccgccaggctccagggaaggggctggagtgggtggccttc

SEQ ID NO: 4520 - DNA, 51 bp, synthetic construct
  misc_feature 1..51: note = Synthetic construct
  source 1..51: mol_type = other DNA
atgagctgggtccgccaggctccagggaaggggctggagtgggttggccgt

SEQ ID NO: 4521 - DNA, 51 bp, synthetic construct
  misc_feature 1..51: note = Synthetic construct
  source 1..51: mol_type = other DNA
atgagctgggtccgccaggctccagggaagggtctggagtgggtaggtctc

SEQ ID NO: 4522 - DNA, 51 bp, synthetic construct
  misc_feature 1..51: note = Synthetic construct
  source 1..51: mol_type = other DNA
atgagctgggtccgccaggctccagggacggggctggagtgggtctcagct

SEQ ID NO: 4523 - DNA, 51 bp, synthetic construct
  misc_feature 1..51: note = Synthetic construct
  source 1..51: mol_type = other DNA
atgagctgggtccgccaggctccaggtaaggggctggagtgggtggccaac

SEQ ID NO: 4524 - DNA, 51 bp, synthetic construct
  misc_feature 1..51: note = Synthetic construct
  source 1..51: mol_type = other DNA
atgagctgggtccgcctgactccagggaagtggctggagtgggtggccacc

SEQ ID NO: 4525 - DNA, 51 bp, synthetic construct
  misc_feature 1..51: note = Synthetic construct
  source 1..51: mol_type = other DNA
atgagctgggtccgcctggctccagggaagggcctggagtgggtctcagtt

SEQ ID NO: 4526 - DNA, 51 bp, synthetic construct
  misc_feature 1..51: note = Synthetic construct
  source 1..51: mol_type = other DNA
atgagctgggtccggcaggctccagggaagggactggagtgggtggccaac

SEQ ID NO: 4527 - DNA, 51 bp, synthetic construct
  misc_feature 1..51: note = Synthetic construct
  source 1..51: mol_type = other DNA
atgagttggatccgccaggctccagggaaggggctggagtgggtttcagat

SEQ ID NO: 4528 - DNA, 51 bp, synthetic construct
  misc_feature 1..51: note = Synthetic construct
  source 1..51: mol_type = other DNA
atgagttgggtccgccaagttccagggagggggctggagtgggtctctggc

SEQ ID NO: 4529 - DNA, 51 bp, synthetic construct
  misc_feature 1..51: note = Synthetic construct
  source 1..51: mol_type = other DNA
atgagttgggtccgccaggctccaggcaaggggctggagtgggtggccaat

SEQ ID NO: 4530 - DNA, 51 bp, synthetic construct
  misc_feature 1..51: note = Synthetic construct
  source 1..51: mol_type = other DNA
atgagttgggtccgccaggctccagggaaggggctagagtgggtttcatat

SEQ ID NO: 4531 - DNA, 51 bp, synthetic construct
  misc_feature 1..51: note = Synthetic construct
  source 1..51: mol_type = other DNA
atgagttgggtccgccaggctccagggaaggggctggagtgggtaggtttc

SEQ ID NO: 4532 - DNA, 51 bp, synthetic construct
  misc_feature 1..51: note = Synthetic construct
  source 1..51: mol_type = other DNA
atgagttgggtccgccaggctccagggaaggggctggagtgggtctcaacg

SEQ ID NO: 4533 - DNA, 51 bp, synthetic construct
  misc_feature 1..51: note = Synthetic construct
  source 1..51: mol_type = other DNA
atgagttgggtccgccaggctccagggaaggggctggagtgggtctcagct

SEQ ID NO: 4534 - DNA, 51 bp, synthetic construct
  misc_feature 1..51: note = Synthetic construct
  source 1..51: mol_type = other DNA
atgagttgggtccgccaggctccagggaaggggctggagtgggtggccaat

SEQ ID NO: 4535 - DNA, 51 bp, synthetic construct
  misc_feature 1..51: note = Synthetic construct
  source 1..51: mol_type = other DNA
atgagttgggtccgccaggctccagggaaggggctggagtgggttggccgt

SEQ ID NO: 4536 - DNA, 51 bp, synthetic construct
  misc_feature 1..51: note = Synthetic construct
  source 1..51: mol_type = other DNA
atgagttgggtccgccaggctccggggaaggggctggagtgggtggccaac

SEQ ID NO: 4537 - DNA, 51 bp, synthetic construct
  misc_feature 1..51: note = Synthetic construct
  source 1..51: mol_type = other DNA
atgagttgggtccgccagtctccaggaaaggggctggagtgggtggccaac

SEQ ID NO: 4538 - DNA, 51 bp, synthetic construct
  misc_feature 1..51: note = Synthetic construct
  source 1..51: mol_type = other DNA
atgagttgggtccgccagtctccagggagggggctggagtgggttggccga

SEQ ID NO: 4539 - DNA, 51 bp, synthetic construct
  misc_feature 1..51: note = Synthetic construct
  source 1..51: mol_type = other DNA
atgagttgggtccggcaggctccaggaaagggactagagtgggtcgcatat

SEQ ID NO: 4540 - DNA, 51 bp, synthetic construct
  misc_feature 1..51: note = Synthetic construct
  source 1..51: mol_type = other DNA
atgatatgggtgcgacaggcccctggagaagggcttgagtggatgggaggg

SEQ ID NO: 4541 - DNA, 51 bp, synthetic construct
  misc_feature 1..51: note = Synthetic construct
  source 1..51: mol_type = other DNA
atgatctggatccgccaggctccagggaaggggctggagtggatttcattc

SEQ ID NO: 4542 - DNA, 51 bp, synthetic construct
  misc_feature 1..51: note = Synthetic construct
  source 1..51: mol_type = other DNA
atgatctgggtccgccagcctccagggaaggggctggagtgggtctcatct

SEQ ID NO: 4543 - DNA, 51 bp, synthetic construct
  misc_feature 1..51: note = Synthetic construct
  source 1..51: mol_type = other DNA
atgatctgggtccgccaggctccagggaaggggctggagtgggtctcatct

SEQ ID NO: 4544 - DNA, 51 bp, synthetic construct
  misc_feature 1..51: note = Synthetic construct
  source 1..51: mol_type = other DNA
atgatctgggtccgccaggctccagggaaggggctggagtgggttgcatat

SEQ ID NO: 4545 - DNA, 51 bp, synthetic construct
  misc_feature 1..51: note = Synthetic construct
  source 1..51: mol_type = other DNA
atgcactggattcaacaggcccctggaaaagggcttgagtggttgggacgt

SEQ ID NO: 4546 - DNA, 51 bp, synthetic construct
  misc_feature 1..51: note = Synthetic construct
  source 1..51: mol_type = other DNA
atgcactgggcccgccaggctccagacaagggcctggagtgggtggcgatt

SEQ ID NO: 4547 - DNA, 51 bp, synthetic construct
  misc_feature 1..51: note = Synthetic construct
  source 1..51: mol_type = other DNA
atgcactgggtccgccaagctccagggaagggactggtgtgggtctcacgt

SEQ ID NO: 4548 - DNA, 51 bp, synthetic construct
  misc_feature 1..51: note = Synthetic construct
  source 1..51: mol_type = other DNA
atgcactgggtccgccactctccagggaagggactggagtgggtctcatcc

SEQ ID NO: 4549 - DNA, 51 bp, synthetic construct
  misc_feature 1..51: note = Synthetic construct
  source 1..51: mol_type = other DNA
atgcactgggtccgccagcctccagggaagggactgcaatttgtttcaagt

SEQ ID NO: 4550 - DNA, 51 bp, synthetic construct
  misc_feature 1..51: note = Synthetic construct
  source 1..51: mol_type = other DNA
atgcactgggtccgccaggcgccaggcaaggggctggagtgggtggcaggt

SEQ ID NO: 4551 - DNA, 51 bp, synthetic construct
  misc_feature 1..51: note = Synthetic construct
  source 1..51: mol_type = other DNA
atgcactgggtccgccaggctccaggcaagggactggagtgggtggcagtt

SEQ ID NO: 4552 - DNA, 51 bp, synthetic construct
  misc_feature 1..51: note = Synthetic construct
  source 1..51: mol_type = other DNA
atgcactgggtccgccaggctccaggcaagggcctggagtggctggcactt

SEQ ID NO: 4553 - DNA, 51 bp, synthetic construct
  misc_feature 1..51: note = Synthetic construct
  source 1..51: mol_type = other DNA
atgcactgggtccgccaggctccaggcaaggggctgcaatggctgggagtt

SEQ ID NO: 4554 - DNA, 51 bp, synthetic construct
  misc_feature 1..51: note = Synthetic construct
  source 1..51: mol_type = other DNA
atgcactgggtccgccaggctccaggcaaggggctggaatggctggcagtt

SEQ ID NO: 4555 - DNA, 51 bp, synthetic construct
  misc_feature 1..51: note = Synthetic construct
  source 1..51: mol_type = other DNA
atgcactgggtccgccaggctccaggcaaggggctggaatgggtggcagtt

SEQ ID NO: 4556 - DNA, 51 bp, synthetic construct
  misc_feature 1..51: note = Synthetic construct
  source 1..51: mol_type = other DNA
atgcactgggtccgccaggctccaggcaaggggctggagtggctggcactt

SEQ ID NO: 4557 - DNA, 51 bp, synthetic construct
  misc_feature 1..51: note = Synthetic construct
  source 1..51: mol_type = other DNA
atgcactgggtccgccaggctccaggcaaggggctggagtggctggcagtc

SEQ ID NO: 4558 - DNA, 51 bp, synthetic construct
  misc_feature 1..51: note = Synthetic construct
  source 1..51: mol_type = other DNA
atgcactgggtccgccaggctccaggcaaggggctggagtggctggcagtt

SEQ ID NO: 4559 - DNA, 51 bp, synthetic construct
  misc_feature 1..51: note = Synthetic construct
  source 1..51: mol_type = other DNA
atgcactgggtccgccaggctccaggcaaggggctggagtgggtgacagtt

SEQ ID NO: 4560 - DNA, 51 bp, synthetic construct
  misc_feature 1..51: note = Synthetic construct
  source 1..51: mol_type = other DNA
atgcactgggtccgccaggctccaggcaaggggctggagtgggtgacattt

SEQ ID NO: 4561 - DNA, 51 bp, synthetic construct
  misc_feature 1..51: note = Synthetic construct
  source 1..51: mol_type = other DNA
atgcactgggtccgccaggctccaggcaaggggctggagtgggtggcaatt

SEQ ID NO: 4562 - DNA, 51 bp, synthetic construct
  misc_feature 1..51: note = Synthetic construct
  source 1..51: mol_type = other DNA
atgcactgggtccgccaggctccaggcaaggggctggagtgggtggcacaa

SEQ ID NO: 4563 - DNA, 51 bp, synthetic construct
  misc_feature 1..51: note = Synthetic construct
  source 1..51: mol_type = other DNA
atgcactgggtccgccaggctccaggcaaggggctggagtgggtggcagta

SEQ ID NO: 4564 - DNA, 51 bp, synthetic construct
  misc_feature 1..51: note = Synthetic construct
  source 1..51: mol_type = other DNA
atgcactgggtccgccaggctccaggcaaggggctggagtgggtggcagtt

SEQ ID NO: 4565 - DNA, 51 bp, synthetic construct
  misc_feature 1..51: note = Synthetic construct
  source 1..51: mol_type = other DNA
atgcactgggtccgccaggctccaggcaaggggctggagtgggtggcatat

SEQ ID NO: 4566 - DNA, 51 bp, synthetic construct
  misc_feature 1..51: note = Synthetic construct
  source 1..51: mol_type = other DNA
atgcactgggtccgccaggctccaggcaaggggctggagtgggtggcattt

SEQ ID NO: 4567 - DNA, 51 bp, synthetic construct
  misc_feature 1..51: note = Synthetic construct
  source 1..51: mol_type = other DNA
atgcactgggtccgccaggctccaggcaaggggctggagtgggtggccgtt

SEQ ID NO: 4568 - DNA, 51 bp, synthetic construct
  misc_feature 1..51: note = Synthetic construct
  source 1..51: mol_type = other DNA
atgcactgggtccgccaggctccaggcaaggggctggagtgggtggctttt

SEQ ID NO: 4569 - DNA, 51 bp, synthetic construct
  misc_feature 1..51: note = Synthetic construct
  source 1..51: mol_type = other DNA
atgcactgggtccgccaggctccaggcaaggggctggagtgggtgggagtt

SEQ ID NO: 4570 - DNA, 51 bp, synthetic construct
  misc_feature 1..51: note = Synthetic construct
  source 1..51: mol_type = other DNA
atgcactgggtccgccaggctccaggcaaggggctggagtgggtgtcaatt

SEQ ID NO: 4571 - DNA, 51 bp, synthetic construct
  misc_feature 1..51: note = Synthetic construct
  source 1..51: mol_type = other DNA
atgcactgggtccgccaggctccaggcaaggggctggagtgggtgtcatgt

SEQ ID NO: 4572 - DNA, 51 bp, synthetic construct
  misc_feature 1..51: note = Synthetic construct
  source 1..51: mol_type = other DNA
atgcactgggtccgccaggctccaggcaaggggctggagtggttatcactt

SEQ ID NO: 4573 - DNA, 51 bp, synthetic construct
  misc_feature 1..51: note = Synthetic construct
  source 1..51: mol_type = other DNA
atgcactgggtccgccaggctccaggcaggggtctggagtgggtggcaggt

SEQ ID NO: 4574 - DNA, 51 bp, synthetic construct
  misc_feature 1..51: note = Synthetic construct
  source 1..51: mol_type = other DNA
atgcactgggtccgccaggctccaggcgaggggctggagtgggtggcgttt

SEQ ID NO: 4575 - DNA, 51 bp, synthetic construct
  misc_feature 1..51: note = Synthetic construct
  source 1..51: mol_type = other DNA
atgcactgggtccgccaggcttccgggaaagggctggagtgggttggccgt

SEQ ID NO: 4576 - DNA, 51 bp, synthetic construct
  misc_feature 1..51: note = Synthetic construct
  source 1..51: mol_type = other DNA
atgcactgggtccggcaaactccagggaagggcctggagtgggtcgcaggt

SEQ ID NO: 4577 - DNA, 51 bp, synthetic construct
  misc_feature 1..51: note = Synthetic construct
  source 1..51: mol_type = other DNA
atgcactgggtccggcaagctccagggaaaggcctggagtgggtctcaggt

SEQ ID NO: 4578 - DNA, 51 bp, synthetic construct
  misc_feature 1..51: note = Synthetic construct
  source 1..51: mol_type = other DNA
atgcactgggtccggcaagctccagggaagggcctggagtgggtctcaggc

SEQ ID NO: 4579 - DNA, 51 bp, synthetic construct
  misc_feature 1..51: note = Synthetic construct
  source 1..51: mol_type = other DNA
atgcactgggtccggcaagctccagggaagggcctggagtgggtctcaggt

SEQ ID NO: 4580 - DNA, 51 bp, synthetic construct
  misc_feature 1..51: note = Synthetic construct
  source 1..51: mol_type = other DNA
atgcactgggtccggcaagttccagggaagggcctggagtgggtctcaggt

SEQ ID NO: 4581 - DNA, 51 bp, synthetic construct
  misc_feature 1..51: note = Synthetic construct
  source 1..51: mol_type = other DNA
atgcactgggtccgtcaggctccggggaaaggtctggaatgggtctctctt

SEQ ID NO: 4582 - DNA, 51 bp, synthetic construct
  misc_feature 1..51: note = Synthetic construct
  source 1..51: mol_type = other DNA
atgcactgggtccgtcaggctccggggaagggtctggagtgggtctctctt

SEQ ID NO: 4583 - DNA, 51 bp, synthetic construct
  misc_feature 1..51: note = Synthetic construct
  source 1..51: mol_type = other DNA
atgcactgggtccgtcgggtgccggggaagggtctggagtgggtctctgcc

SEQ ID NO: 4584 - DNA, 51 bp, synthetic construct
  misc_feature 1..51: note = Synthetic construct
  source 1..51: mol_type = other DNA
atgcactgggtgcaacaggcccctggaaaagggcttgagtggatgggacgt

SEQ ID NO: 4585 - DNA, 51 bp, synthetic construct
  misc_feature 1..51: note = Synthetic construct
  source 1..51: mol_type = other DNA
atgcactgggtgcaacgggccccaggaagagggtttgagtggatgggacgt

SEQ ID NO: 4586 - DNA, 51 bp, synthetic construct
  misc_feature 1..51: note = Synthetic construct
  source 1..51: mol_type = other DNA
atgcactgggtgcatcaggcccctggcaaaggccttgagtggatgggacgt

SEQ ID NO: 4587 - DNA, 51 bp, synthetic construct
  misc_feature 1..51: note = Synthetic construct
  source 1..51: mol_type = other DNA
atgcactgggtgcgacaggcccctggacaaggacttgaatggatgggaata

SEQ ID NO: 4588 - DNA, 51 bp, synthetic construct
  misc_feature 1..51: note = Synthetic construct
  source 1..51: mol_type = other DNA
atgcactgggtgcgacaggcccctggacaaggccttgagtggatgggagtg

SEQ ID NO: 4589 - DNA, 51 bp, synthetic construct
  misc_feature 1..51: note = Synthetic construct
  source 1..51: mol_type = other DNA
atgcactgggtgcgacaggcccctggacaagggcctgagtgggtggctatg

SEQ ID NO: 4590 - DNA, 51 bp, synthetic construct
  misc_feature 1..51: note = Synthetic construct
  source 1..51: mol_type = other DNA
atgcactgggtgcgacaggcccctggacaagggcttgagtggatgggaata

SEQ ID NO: 4591 - DNA, 51 bp, synthetic construct
  misc_feature 1..51: note = Synthetic construct
  source 1..51: mol_type = other DNA
atgcactgggtgcgacaggcccctggacaagggcttgagtggatgggagta

SEQ ID NO: 4592 - DNA, 51 bp, synthetic construct
  misc_feature 1..51: note = Synthetic construct
  source 1..51: mol_type = other DNA
atgcactgggtgcgacaggcccctggacaagggcttgagtggatgggatgg

SEQ ID NO: 4593 - DNA, 51 bp, synthetic construct
  misc_feature 1..51: note = Synthetic construct
  source 1..51: mol_type = other DNA
atgcactgggtgcgacaggcccctggacaagggcttgagtggatggggaca

SEQ ID NO: 4594 - DNA, 51 bp, synthetic construct
  misc_feature 1..51: note = Synthetic construct
  source 1..51: mol_type = other DNA
atgcactgggtgcgacaggcccctggccaggggcttgagtggatgggatta

SEQ ID NO: 4595 - DNA, 51 bp, synthetic construct
  misc_feature 1..51: note = Synthetic construct
  source 1..51: mol_type = other DNA
atgcactgggtgcgacaggctcctggaaaagggcttgagtggatgggaggt

SEQ ID NO: 4596 - DNA, 51 bp, synthetic construct
  misc_feature 1..51: note = Synthetic construct
  source 1..51: mol_type = other DNA
atgcactgggtgcgccaggcccccggacaaaggcttgagtggatgggacgc

SEQ ID NO: 4597 - DNA, 51 bp, synthetic construct
  misc_feature 1..51: note = Synthetic construct
  source 1..51: mol_type = other DNA
atgcagtgggtgcgacaggctcgtggacaacgccttgagtggataggatgg

SEQ ID NO: 4598 - DNA, 51 bp, synthetic construct
  misc_feature 1..51: note = Synthetic construct
  source 1..51: mol_type = other DNA
atgcattgggtccgccaggccccaggcaaagggctggagtgggtggctgtc

SEQ ID NO: 4599 - DNA, 51 bp, synthetic construct
  misc_feature 1..51: note = Synthetic construct
  source 1..51: mol_type = other DNA
atgcattgggtgcgccaggcccccggacaaaggcttgagtggatgggatgg

SEQ ID NO: 4600 - DNA, 51 bp, synthetic construct
  misc_feature 1..51: note = Synthetic construct
  source 1..51: mol_type = other DNA
atgcattgggtgcgccaggcccccggacaagggcttgagtggatgggatgg

SEQ ID NO: 4601 - DNA, 51 bp, synthetic construct
  misc_feature 1..51: note = Synthetic construct
  source 1..51: mol_type = other DNA
atgcattgggtgcgccaggcccccggacagaggcttgagtggatgggatgg

SEQ ID NO: 4602 - DNA, 51 bp, synthetic construct
  misc_feature 1..51: note = Synthetic construct
  source 1..51: mol_type = other DNA
atgcattgggtgcgccaggcccctggagaagggcttgagtggatgggacgt

SEQ ID NO: 4603 - DNA, 51 bp, synthetic construct
  misc_feature 1..51: note = Synthetic construct
  source 1..51: mol_type = other DNA
atggactgggtccgccaggctccagggaaggggctggagtgggtctcatcc

SEQ ID NO: 4604 - DNA, 51 bp, synthetic construct
  misc_feature 1..51: note = Synthetic construct
  source 1..51: mol_type = other DNA
atggactgggtccgccaggctccagggatgggactggagtgggttggccgt

SEQ ID NO: 4605 - DNA, 51 bp, synthetic construct
  misc_feature 1..51: note = Synthetic construct
  source 1..51: mol_type = other DNA
atggattgggtccgccaggcgccaggcaagggtctggagtgggtggcaggt

SEQ ID NO: 4606 - DNA, 51 bp, synthetic construct
  misc_feature 1..51: note = Synthetic construct
  source 1..51: mol_type = other DNA
atggcctgggtccgccaggctccagggaaggggctgttgtggatcggtttc

SEQ ID NO: 4607 - DNA, 51 bp, synthetic construct
  misc_feature 1..51: note = Synthetic construct
  source 1..51: mol_type = other DNA
atggcctgggtccgccagtctccagaaaaggggctggattgggtctcactt

SEQ ID NO: 4608 - DNA, 51 bp, synthetic construct
  misc_feature 1..51: note = Synthetic construct
  source 1..51: mol_type = other DNA
atggcgtgggtccgcaaggcgccagggaaggggctggagtgggtctcctcc

SEQ ID NO: 4609 - DNA, 51 bp, synthetic construct
  misc_feature 1..51: note = Synthetic construct
  source 1..51: mol_type = other DNA
atggcttggatccgccagactccagggcagggactggagtggattgcatat

SEQ ID NO: 4610 - DNA, 51 bp, synthetic construct
  misc_feature 1..51: note = Synthetic construct
  source 1..51: mol_type = other DNA
atgggctggatccgccaggcaccagggaaggggctggagtggatttcatat

SEQ ID NO: 4611 - DNA, 51 bp, synthetic construct
  misc_feature 1..51: note = Synthetic construct
  source 1..51: mol_type = other DNA
atgggctgggtccgccaggctccagggaaggggctggagtgggtggccaac

SEQ ID NO: 4612 - DNA, 51 bp, synthetic construct
  misc_feature 1..51: note = Synthetic construct
  source 1..51: mol_type = other DNA
atgggctgggtccgccaggctccagggaaggggcttgagtgggtcgcaggc

SEQ ID NO: 4613 - DNA, 51 bp, synthetic construct
  misc_feature 1..51: note = Synthetic construct
  source 1..51: mol_type = other DNA
atggtctgggtccgccaggctccagggaaggggctggagtggatttcatac

SEQ ID NO: 4614 - DNA, 51 bp, synthetic construct
  misc_feature 1..51: note = Synthetic construct
  source 1..51: mol_type = other DNA
atggtctgggtccgccaggctccagggaaggggctggagtgggtctcgtcc

SEQ ID NO: 4615 - DNA, 51 bp, synthetic construct
  misc_feature 1..51: note = Synthetic construct
  source 1..51: mol_type = other DNA
atgtactgggtccgccaagctccagggaaggggctggtgtgggtctcacgt

SEQ ID NO: 4616 - DNA, 51 bp, synthetic construct; identical to SEQ ID NO: 1782
  misc_feature 1..51: note = Synthetic construct
  source 1..51: mol_type = other DNA

SEQ ID NO: 4617 - DNA, 51 bp, synthetic construct
  misc_feature 1..51: note = Synthetic construct
  source 1..51: mol_type = other DNA
atgtcctggttccgccaggctccagggaaggggccggagtgggtctcagtc

SEQ ID NO: 4618 - DNA, 51 bp, synthetic construct
  misc_feature 1..51: note = Synthetic construct
  source 1..51: mol_type = other DNA
atgtcgtgggtccgccagtctccagggaagggactggaatgggtctcatcc

SEQ ID NO: 4619 - DNA, 51 bp, synthetic construct
  misc_feature 1..51: note = Synthetic construct
  source 1..51: mol_type = other DNA
atgttctgggtccgccaggctccagggaaggggctggagtgggtctctggt

SEQ ID NO: 4620 - DNA, 51 bp, synthetic construct
  misc_feature 1..51: note = Synthetic construct
  source 1..51: mol_type = other DNA
attaattgggtgcgacaggcccctggacaaggtcttgagtgggtgggaggg

SEQ ID NO: 4621 - DNA, 51 bp, synthetic construct
  misc_feature 1..51: note = Synthetic construct
  source 1..51: mol_type = other DNA
attaattgggtgcgacaggcctctggtcaagggcccgagtggatgggatgg

SEQ ID NO: 4622 - DNA, 51 bp, synthetic construct
  misc_feature 1..51: note = Synthetic construct
  source 1..51: mol_type = other DNA
attacctgggtgcgacaggcccctggacaaggtcttgagtggctgggaggg

SEQ ID NO: 4623 - DNA, 51 bp, synthetic construct
  misc_feature 1..51: note = Synthetic construct
  source 1..51: mol_type = other DNA
attcactggatgcgacaaagtcgtggactacgccttgagtggatgggatgg

SEQ ID NO: 4624 - DNA, 51 bp, synthetic construct
  misc_feature 1..51: note = Synthetic construct
  source 1..51: mol_type = other DNA
attcactgggtgcaacaggcccctggaaaagggcttgagtggttgggtcgt

SEQ ID NO: 4625 - DNA, 51 bp, synthetic construct
  misc_feature 1..51: note = Synthetic construct
  source 1..51: mol_type = other DNA
attcactgggtgcgacaggcccctggacaagggcttgagtggatgggatgg

SEQ ID NO: 4626 - DNA, 51 bp, synthetic construct
  misc_feature 1..51: note = Synthetic construct
  source 1..51: mol_type = other DNA
attcactgggtggtacaggcccctggaaaagggcttgagtggatgggacgt

SEQ ID NO: 4627 - DNA, 51 bp, synthetic construct
  misc_feature 1..51: note = Synthetic construct
  source 1..51: mol_type = other DNA
attcactgggttcgacaggcccctggacaagggcttgagtggatgggccgg

SEQ ID NO: 4628 - DNA, 51 bp, synthetic construct
  misc_feature 1..51: note = Synthetic construct
  source 1..51: mol_type = other DNA
attcagtgggtgcgacaggcccctggacaagggcttgagtggatgggatgg

SEQ ID NO: 4629 - DNA, 51 bp, synthetic construct
  misc_feature 1..51: note = Synthetic construct
  source 1..51: mol_type = other DNA
attcattggctgcgccaggcccccgggcaaaggcctgagtggttgggatac

SEQ ID NO: 4630 - DNA, 51 bp, synthetic construct
  misc_feature 1..51: note = Synthetic construct
  source 1..51: mol_type = other DNA
attcattgggtccgccaggctccaggcaaggggctggagtgggtctcggtt

SEQ ID NO: 4631 - DNA, 51 bp, synthetic construct; identical to SEQ ID NO: 1785
  misc_feature 1..51: note = Synthetic construct
  source 1..51: mol_type = other DNA

SEQ ID NO: 4632 - DNA, 51 bp, synthetic construct
  misc_feature 1..51: note = Synthetic construct
  source 1..51: mol_type = other DNA
atttactgggtgcaacaggcccctggaaaaggccctgagtggatgggacgt

SEQ ID NO: 4633 - DNA, 51 bp, synthetic construct
  misc_feature 1..51: note = Synthetic construct
  source 1..51: mol_type = other DNA
ctacactggctacgtcagactccaggcaaggggctggagtggttggctggt

SEQ ID NO: 4634 - DNA, 51 bp, synthetic construct
  misc_feature 1..51: note = Synthetic construct
  source 1..51: mol_type = other DNA
ctcacctgggtgcgacaggcccccggacaggggcttgagttcatgggaggg

SEQ ID NO: 4635 - DNA, 51 bp, synthetic construct
  misc_feature 1..51: note = Synthetic construct
  source 1..51: mol_type = other DNA
ctcagctggatccgacaggcccctggacaagggcttgagtgggtgggagcc

SEQ ID NO: 4636 - DNA, 51 bp, synthetic construct
  misc_feature 1..51: note = Synthetic construct
  source 1..51: mol_type = other DNA
ctcagctgggtgcgacaggtccctggacaagggcttgagtggatggggggg

SEQ ID NO: 4637 - DNA, 51 bp, synthetic construct
  misc_feature 1..51: note = Synthetic construct
  source 1..51: mol_type = other DNA
ctcagttgggtgcgacaggcccctggacaagggcttgagtggatgggagga

SEQ ID NO: 4638 - DNA, 51 bp, synthetic construct
  misc_feature 1..51: note = Synthetic construct
  source 1..51: mol_type = other DNA
ctgaactgggtccgccaggctccagggaaggggctggagtggatcgcatcc

SEQ ID NO: 4639 - DNA, 51 bp, synthetic construct
  misc_feature 1..51: note = Synthetic construct
  source 1..51: mol_type = other DNA
ctgaactgggtccgccaggctccggggaagggactggagtggatttcatac

SEQ ID NO: 4640 - DNA, 51 bp, synthetic construct
  misc_feature 1..51: note = Synthetic construct
  source 1..51: mol_type = other DNA
ctgaattgggtgcgacaggcccctggacaagggcttgagttgatgggatgg

SEQ ID NO: 4641 - DNA, 51 bp, synthetic construct
  misc_feature 1..51: note = Synthetic construct
  source 1..51: mol_type = other DNA
ctgacctgggtccgccagactccagggagggggttggagtgggtggccaat

SEQ ID NO: 4642 - DNA, 51 bp, synthetic construct
  misc_feature 1..51: note = Synthetic construct
  source 1..51: mol_type = other DNA
ctgacctgggtccgccaggctccagggaagggactggagtgggtcgcccaa

SEQ ID NO: 4643 - DNA, 51 bp, synthetic construct
  misc_feature 1..51: note = Synthetic construct
  source 1..51: mol_type = other DNA
ctgagctgggtccgccaggctccagggaaggggctggagtgggtggccagc

SEQ ID NO: 4644 - DNA, 51 bp, synthetic construct
  misc_feature 1..51: note = Synthetic construct
  source 1..51: mol_type = other DNA
ctgagctgggtccgccaggctcccgggaaggggctggagtgggtcgctttc

SEQ ID NO: 4645 - DNA, 51 bp, synthetic construct; identical to SEQ ID NO: 1781
  misc_feature 1..51: note = Synthetic construct
  source 1..51: mol_type = other DNA

SEQ ID NO: 4646 - DNA, 51 bp, synthetic construct
  misc_feature 1..51: note = Synthetic construct
  source 1..51: mol_type = other DNA
ctgagttggatccgcctgagtccaggcaaggggatggagtgggttggccgt

SEQ ID NO: 4647 - DNA, 51 bp, synthetic construct
  misc_feature 1..51: note = Synthetic construct
  source 1..51: mol_type = other DNA
ctgagttgggtccgccaggctcccgggaagggtctggagtgggtagggctc

SEQ ID NO: 4648 - DNA, 51 bp, synthetic construct
  misc_feature 1..51: note = Synthetic construct
  source 1..51: mol_type = other DNA
ctgcactgggtccgacaggcccctggacaagggcttgagtggatgggaatg

SEQ ID NO: 4649 - DNA, 51 bp, synthetic construct
  misc_feature 1..51: note = Synthetic construct
  source 1..51: mol_type = other DNA
ctgcactgggtccgccaggctccaggcaaggggctggagtgggtgtcagtt

SEQ ID NO: 4650 - DNA, 51 bp, synthetic construct
  misc_feature 1..51: note = Synthetic construct
  source 1..51: mol_type = other DNA
ctgggctggttccgtcggcccccaggaaaggccctagagtggcttgcattc

SEQ ID NO: 4651 - DNA, 51 bp, synthetic construct
  misc_feature 1..51: note = Synthetic construct
  source 1..51: mol_type = other DNA
cttatctgggtgcgccaggcccctggacaagggcctgaatgcatgggatgg

SEQ ID NO: 4652 - DNA, 51 bp, synthetic construct
  misc_feature 1..51: note = Synthetic construct
  source 1..51: mol_type = other DNA
gtacactgggtccgccaggctccaggcaaggggctggagtgggtggcagtg

SEQ ID NO: 4653 - DNA, 51 bp, synthetic construct
  misc_feature 1..51: note = Synthetic construct
  source 1..51: mol_type = other DNA
gtacattggatgcgccaggcccccggacaacggcttgagtggatggggtgg

SEQ ID NO: 4654 - DNA, 51 bp, synthetic construct
  misc_feature 1..51: note = Synthetic construct
  source 1..51: mol_type = other DNA
gtcaactgggtgcgacaggccactggacaaggccttgagtggttgggacgg

SEQ ID NO: 4655 - DNA, 51 bp, synthetic construct
  misc_feature 1..51: note = Synthetic construct
  source 1..51: mol_type = other DNA
gtcaactgggtgcgccaggcccctggacatgggcttgagtggatgggaggc

SEQ ID NO: 4656 - DNA, 51 bp, synthetic construct
  misc_feature 1..51: note = Synthetic construct
  source 1..51: mol_type = other DNA
gtcacctgggtgcgacaggcccctggacaagggcttgagtggatggggggg

SEQ ID NO: 4657 - DNA, 51 bp, synthetic construct
  misc_feature 1..51: note = Synthetic construct
  source 1..51: mol_type = other DNA
gtcacctgggtgcgccaggcccctggacaagggcttgagtgtgtgggacag

SEQ ID NO: 4658 - DNA, 51 bp, synthetic construct
  misc_feature 1..51: note = Synthetic construct
  source 1..51: mol_type = other DNA
gtcacgtgggtgcgacaggcccctggacaagggcttgaatgggtgggagag

SEQ ID NO: 4659 - DNA, 51 bp, synthetic construct
  misc_feature 1..51: note = Synthetic construct
  source 1..51: mol_type = other DNA
gtcagctggatccgtcagcccccagggaaggccctggagtggcttgcacac

SEQ ID NO: 4660 - DNA, 51 bp, synthetic construct
  misc_feature 1..51: note = Synthetic construct
  source 1..51: mol_type = other DNA
gtcagctggatccgtcagcccccagggaaggccctggagtggcttgcacgc

SEQ ID NO: 4661 - DNA, 51 bp, synthetic construct
  misc_feature 1..51: note = Synthetic construct
  source 1..51: mol_type = other DNA
gtcagctgggtgcgacaggcccccggacaaggccttgagtggatgggcgga

SEQ ID NO: 4662 - DNA, 51 bp, synthetic construct
  misc_feature 1..51: note = Synthetic construct
  source 1..51: mol_type = other DNA
gtcagttgggtgcggcaggcccctggacaagcacctgagtggatgggatgg

SEQ ID NO: 4663 - DNA, 51 bp, synthetic construct
  misc_feature 1..51: note = Synthetic construct
  source 1..51: mol_type = other DNA
gtcggctgggtacgccagacgcccgggaaaggcctggagttgatggggatc

SEQ ID NO: 4664 - DNA, 51 bp, synthetic construct
  misc_feature 1..51: note = Synthetic construct
  source 1..51: mol_type = other DNA
gtcggctgggtgcgccagatgcccgggaaaggcctggagtggatgggtatc

SEQ ID NO: 4665 - DNA, 51 bp, synthetic construct
  misc_feature 1..51: note = Synthetic construct
  source 1..51: mol_type = other DNA
gtgacctggattcggcagccccccgggaagggcctggagtggattggggaa

SEQ ID NO: 4666 - DNA, 51 bp, synthetic construct
  misc_feature 1..51: note = Synthetic construct
  source 1..51: mol_type = other DNA
gtgacctgggtccgccaggctccagggaaggcactggagtgggtcggagtt

SEQ ID NO: 4667 - DNA, 51 bp, synthetic construct
  misc_feature 1..51: note = Synthetic construct
  source 1..51: mol_type = other DNA
gtgacctgggtccgccaggctccaggggaggggctggagtgggtaggtttc

SEQ ID NO: 4668 - DNA, 51 bp, synthetic construct
  misc_feature 1..51: note = Synthetic construct
  source 1..51: mol_type = other DNA
gtgagctggatccgtcagcccccagggaaggccccggagtggctagcacgc

SEQ ID NO: 4669 - DNA, 51 bp, synthetic construct
  misc_feature 1..51: note = Synthetic construct
  source 1..51: mol_type = other DNA
gtgagctggatccgtcagcccccagggaaggccctggaatggcttgcacgc

SEQ ID NO: 4670 - DNA, 51 bp, synthetic construct
  misc_feature 1..51: note = Synthetic construct
  source 1..51: mol_type = other DNA
gtgagctggatccgtcagcccccagggaaggccctggagtggcttgcacac

SEQ ID NO: 4671 - DNA, 51 bp, synthetic construct
  misc_feature 1..51: note = Synthetic construct
  source 1..51: mol_type = other DNA
gtgagctggatccgtcagcccccagggaaggccctggagtggcttgcacgc

SEQ ID NO: 4672 - DNA, 51 bp, synthetic construct
  misc_feature 1..51: note = Synthetic construct
  source 1..51: mol_type = other DNA
gtgagctggatccgtcagcccccagggaaggccctggagtggcttgcccac

SEQ ID NO: 4673 - DNA, 51 bp, synthetic construct
  misc_feature 1..51: note = Synthetic construct
  source 1..51: mol_type = other DNA
gtgagctgggtccgccaggctccaggcaaggggctggagtgggtaggtttc

SEQ ID NO: 4674 - DNA, 51 bp, synthetic construct
  misc_feature 1..51: note = Synthetic construct
  source 1..51: mol_type = other DNA
gtgagctgggtccgtcagcccccagggaagggcctggagtggcttgcacgc

SEQ ID NO: 4675 - DNA, 51 bp, synthetic construct
  misc_feature 1..51: note = Synthetic construct
  source 1..51: mol_type = other DNA
gtgagttgggtccgcctgagtccagggaaggggctggagtgggtctcaggt

SEQ ID NO: 4676 - DNA, 51 bp, synthetic construct
  misc_feature 1..51: note = Synthetic construct
  source 1..51: mol_type = other DNA
gtgagttggttccgtcagcccccagggaaggccctggagttccttgcacgc

SEQ ID NO: 4677 - DNA, 51 bp, synthetic construct
  misc_feature 1..51: note = Synthetic construct
  source 1..51: mol_type = other DNA
gtgcactggatccgtcagcccccaggagcggccctggagtggcttgcactc

SEQ ID NO: 4678 - DNA, 51 bp, synthetic construct
  misc_feature 1..51: note = Synthetic construct
  source 1..51: mol_type = other DNA
gtgggctggatccgacagcccccaggaaaggccctggagtggcttggattc

SEQ ID NO: 4679 - DNA, 51 bp, synthetic construct
  misc_feature 1..51: note = Synthetic construct
  source 1..51: mol_type = other DNA
gtgggctggatccgtcagcccccaggaaaggccctggagtggctggcactc

SEQ ID NO: 4680 - DNA, 51 bp, synthetic construct
  misc_feature 1..51: note = Synthetic construct
  source 1..51: mol_type = other DNA
gtgggctggatccgtcagcccccaggaaaggccctggagtggcttgcactc

SEQ ID NO: 4681 - DNA, 51 bp, synthetic construct
  misc_feature 1..51: note = Synthetic construct
  source 1..51: mol_type = other DNA
gtgggctggatccgtcagcccccaggaaaggccctggagtggcttgcattc

SEQ ID NO: 4682 - DNA, 51 bp, synthetic construct
  misc_feature 1..51: note = Synthetic construct
  source 1..51: mol_type = other DNA
gtgggctgggtccgtcagaccccaggaaaggccctggagtggcttgcgctc

SEQ ID NO: 4683 - DNA, 51 bp, synthetic construct
  misc_feature 1..51: note = Synthetic construct
  source 1..51: mol_type = other DNA
gtgggctgggtccgtcagcccccaggaaaggccctggagtggcttgctctc

SEQ ID NO: 4684 - DNA, 51 bp, synthetic construct
  misc_feature 1..51: note = Synthetic construct
  source 1..51: mol_type = other DNA
gtggggtgggtccgccaggctccagggaagggactggagtgggtctcaagt

SEQ ID NO: 4685 - DNA, 51 bp, synthetic construct
  misc_feature 1..51: note = Synthetic construct
  source 1..51: mol_type = other DNA
gttaattgggtccggcaggctcccgggaaggggctggaatggctttcatat

SEQ ID NO: 4686 - DNA, 51 bp, synthetic construct
  misc_feature 1..51: note = Synthetic construct
  source 1..51: mol_type = other DNA
tgcagctggatccggcagcccccagggaagggactggagtggattgggtat

SEQ ID NO: 4687 - DNA, 51 bp, synthetic construct
  misc_feature 1..51: note = Synthetic construct
  source 1..51: mol_type = other DNA
tggaactggatcaggcagtccccatcgagaggccttgagtggctgggaagg

SEQ ID NO: 4688 - DNA, 51 bp, synthetic construct
  misc_feature 1..51: note = Synthetic construct
  source 1..51: mol_type = other DNA
tggaactggatccgacagacaccagggaagggactggagtgggttgggtat

SEQ ID NO: 4689 - DNA, 51 bp, synthetic construct
  misc_feature 1..51: note = Synthetic construct
  source 1..51: mol_type = other DNA
tggaactggatccgacagcccccagggaagggactggagtggattgggtac

SEQ ID NO: 4690 - DNA, 51 bp, synthetic construct
  misc_feature 1..51: note = Synthetic construct
  source 1..51: mol_type = other DNA
tggaactggatccgccaacccccaggggaggggctggagtggattggaaaa

SEQ ID NO: 4691 - DNA, 51 bp, synthetic construct
  misc_feature 1..51: note = Synthetic construct
  source 1..51: mol_type = other DNA
tggaactggatccggcaacccccagggaagcgactggagtggattgggcac

SEQ ID NO: 4692 - DNA, 51 bp, synthetic construct
  misc_feature 1..51: note = Synthetic construct
  source 1..51: mol_type = other DNA
tggaactggatccggcagcccccagggaagggactggagtgggttgggtat

SEQ ID NO: 4693 - DNA, 51 bp, synthetic construct
  misc_feature 1..51: note = Synthetic construct
  source 1..51: mol_type = other DNA
tggaactggatccggcagtccgccgggaagggactggagtggattgggcgt

SEQ ID NO: 4694 - DNA, 51 bp, synthetic construct
  misc_feature 1..51: note = Synthetic construct
  source 1..51: mol_type = other DNA
tggaactggatgcggcagcccgccgggaagggactggagtggattgggcgg

SEQ ID NO: 4695 - DNA, 51 bp, synthetic construct
  misc_feature 1..51: note = Synthetic construct
  source 1..51: mol_type = other DNA
tggaactgggtccggcagcccgccgggaaggggctggagtggattgggcgt

SEQ ID NO: 4696 - DNA, 51 bp, synthetic construct
  misc_feature 1..51: note = Synthetic construct
  source 1..51: mol_type = other DNA
tggaactgggtccggcagcccgccgggaggggactggagtggattgggcgt

SEQ ID NO: 4697 - DNA, 51 bp, synthetic construct
  misc_feature 1..51: note = Synthetic construct
  source 1..51: mol_type = other DNA
tggaactgggtgcggcagtccccagggaagggactggagtggattgggtat

SEQ ID NO: 4698 - DNA, 51 bp, synthetic construct
  misc_feature 1..51: note = Synthetic construct
  source 1..51: mol_type = other DNA
tggaattggatccggcaggccccagggagagaattggagtgggttggatat

SEQ ID NO: 4699 - DNA, 51 bp, synthetic construct
  misc_feature 1..51: note = Synthetic construct
  source 1..51: mol_type = other DNA
tggacatggattcggcagcccccagggaagggactggagtggattggacgt

SEQ ID NO: 4700 - DNA, 51 bp, synthetic construct
  misc_feature 1..51: note = Synthetic construct
  source 1..51: mol_type = other DNA
tggacctggatccgacagtcccccgggaagggactggaatggattggccat

SEQ ID NO: 4701 - DNA, 51 bp, synthetic construct
  misc_feature 1..51: note = Synthetic construct
  source 1..51: mol_type = other DNA
tggacctggatccgccagcccccagggaaggggctggagtggattggggaa

SEQ ID NO: 4702 - DNA, 51 bp, synthetic construct
  misc_feature 1..51: note = Synthetic construct
  source 1..51: mol_type = other DNA
tggacctggatccggcagcccccagggaagggactggagtggattgggtat

SEQ ID NO: 4703 - DNA, 51 bp, synthetic construct
  misc_feature 1..51: note = Synthetic construct
  source 1..51: mol_type = other DNA
tggacctggatccggcagcccccagggaagggactggagtggattggttat

SEQ ID NO: 4704 - DNA, 51 bp, synthetic construct
  misc_feature 1..51: note = Synthetic construct
  source 1..51: mol_type = other DNA
tggacctggatccggcagcccgccggaaagggactggagtggattgggcgt

SEQ ID NO: 4705 - DNA, 51 bp, synthetic construct
  misc_feature 1..51: note = Synthetic construct
  source 1..51: mol_type = other DNA
tggacctggatccggcagcccgccggaaagggactggagtggattggtcgt

SEQ ID NO: 4706 - DNA, 51 bp, synthetic construct
  misc_feature 1..51: note = Synthetic construct
  source 1..51: mol_type = other DNA
tggacctggatccggcagcccgccgggaagggactggagtggattgggcgt

SEQ ID NO: 4707 - DNA, 51 bp, synthetic construct
  misc_feature 1..51: note = Synthetic construct
  source 1..51: mol_type = other DNA
tggacctggatccggcagcccgccgggaagggattggagtggattgggcgt

SEQ ID NO: 4708 - DNA, 51 bp, synthetic construct
  misc_feature 1..51: note = Synthetic construct
  source 1..51: mol_type = other DNA
tggacctggatccggcagcccgccgggaggggcctggagtggattgggcgc

SEQ ID NO: 4709 - DNA, 51 bp, synthetic construct
  misc_feature 1..51: note = Synthetic construct
  source 1..51: mol_type = other DNA
tggacctggatccggcagtccccagggaagggactggagtggattggacat

SEQ ID NO: 4710 - DNA, 51 bp, synthetic construct
  misc_feature 1..51: note = Synthetic construct
  source 1..51: mol_type = other DNA
tggacctggatccggcagtccccagggaagggactggagtggattgggcat

SEQ ID NO: 4711 - DNA, 51 bp, synthetic construct
  misc_feature 1..51: note = Synthetic construct
  source 1..51: mol_type = other DNA
tggacctggattcggcagcccgccgggaagggactggagtggattggacat

SEQ ID NO: 4712 - DNA, 51 bp, synthetic construct
  misc_feature 1..51: note = Synthetic construct
  source 1..51: mol_type = other DNA
tggacctggcttcgacagcccgccggggggcggctggagtggattgggcgt

SEQ ID NO: 4713 - DNA, 51 bp, synthetic construct
  misc_feature 1..51: note = Synthetic construct
  source 1..51: mol_type = other DNA
tggacctgggtccgccagttcccagggaaggggctggagtggattggcgaa

SEQ ID NO: 4714 - DNA, 51 bp, synthetic construct
  misc_feature 1..51: note = Synthetic construct
  source 1..51: mol_type = other DNA
tggacgtggatccgccagcccccaggaaagggcctggagtggattggggaa

SEQ ID NO: 4715 - DNA, 51 bp, synthetic construct
  misc_feature 1..51: note = Synthetic construct
  source 1..51: mol_type = other DNA
tggacttggatccgccagcccccagggaaggggctggagtggattggggat

SEQ ID NO: 4716 - DNA, 51 bp, synthetic construct
  misc_feature 1..51: note = Synthetic construct
  source 1..51: mol_type = other DNA
tggagctggatccgccagcccccagggaaggggctggagtggattggggaa

SEQ ID NO: 4717 - DNA, 51 bp, synthetic construct
  misc_feature 1..51: note = Synthetic construct
  source 1..51: mol_type = other DNA
tggagctggatccgccagcccccagggaaggggctggagtgggtcggggat

SEQ ID NO: 4718 - DNA, 51 bp, synthetic construct
  misc_feature 1..51: note = Synthetic construct
  source 1..51: mol_type = other DNA
tggagctggatccgccagcccccaggtaaggggctggagtggattggggaa

SEQ ID NO: 4719 - DNA, 51 bp, synthetic construct
  misc_feature 1..51: note = Synthetic construct
  source 1..51: mol_type = other DNA
tggagctggatccgccagccccccgggaaggggctggagtggattggggaa

SEQ ID NO: 4720 - DNA, 51 bp, synthetic construct
  misc_feature 1..51: note = Synthetic construct
  source 1..51: mol_type = other DNA
tggagctggatccgccagtccccagggaaggggctggagtggattggggaa

SEQ ID NO: 4721 - DNA, 51 bp, synthetic construct
  misc_feature 1..51: note = Synthetic construct
  source 1..51: mol_type = other DNA
tggagctggatccggcaagccccagggaagggactggagtggattggatat

SEQ ID NO: 4722 - DNA, 51 bp, synthetic construct
  misc_feature 1..51: note = Synthetic construct
  source 1..51: mol_type = other DNA
tggagctggatccggcagccaccagggaagggactggagtggattgggtat

SEQ ID NO: 4723 - DNA, 51 bp, synthetic construct
  misc_feature 1..51: note = Synthetic construct
  source 1..51: mol_type = other DNA
tggagctggatccggcagccaccagggaagggcctggagtggattgggtac

SEQ ID NO: 4724 - DNA, 51 bp, synthetic construct
  misc_feature 1..51: note = Synthetic construct
  source 1..51: mol_type = other DNA
tggagctggatccggcagccaccagggcagggactggagtggattggagat

SEQ ID NO: 4725 - DNA, 51 bp, synthetic construct
  misc_feature 1..51: note = Synthetic construct
  source 1..51: mol_type = other DNA
tggagctggatccggcagcccccagggaagggactggaatggattggatat

SEQ ID NO: 4726 - DNA, 51 bp, synthetic construct
  misc_feature 1..51: note = Synthetic construct
  source 1..51: mol_type = other DNA
tggagctggatccggcagcccccagggaagggactggagtggatcgggtat

SEQ ID NO: 4727 - DNA, 51 bp, synthetic construct
  misc_feature 1..51: note = Synthetic construct
  source 1..51: mol_type = other DNA
tggagctggatccggcagcccccagggaagggactggagtggattggatat

SEQ ID NO: 4728 - DNA, 51 bp, synthetic construct
  misc_feature 1..51: note = Synthetic construct
  source 1..51: mol_type = other DNA
tggagctggatccggcagcccccagggaagggactggagtggattgggtat

SEQ ID NO: 4729 - DNA, 51 bp, synthetic construct
  misc_feature 1..51: note = Synthetic construct
  source 1..51: mol_type = other DNA
tggagctggatccggcagccccccgggaagggactggagtggattgggaat

SEQ ID NO: 4730 - DNA, 51 bp, synthetic construct
  misc_feature 1..51: note = Synthetic construct
  source 1..51: mol_type = other DNA
tggagctggatccggcagccccccgggaagggactggagtggattgggtat

SEQ ID NO: 4731 - DNA, 51 bp, synthetic construct
  misc_feature 1..51: note = Synthetic construct
  source 1..51: mol_type = other DNA
tggagctggatccggcagccccctgggaagggactggagtggattgggtat

SEQ ID NO: 4732 - DNA, 51 bp, synthetic construct
  misc_feature 1..51: note = Synthetic construct
  source 1..51: mol_type = other DNA
tggagctggatccggcagcccgccgggaagggactggagtggattggacga

SEQ ID NO: 4733 - DNA, 51 bp, synthetic construct
  misc_feature 1..51: note = Synthetic construct
  source 1..51: mol_type = other DNA
tggagctggatccggcagcccgccgggaagggactggagtggattgggcgc

SEQ ID NO: 4734 - DNA, 51 bp, synthetic construct
  misc_feature 1..51: note = Synthetic construct
  source 1..51: mol_type = other DNA
tggagctggatccggcagcccgccgggaagggactggagtggattgggcgt

SEQ ID NO: 4735 - DNA, 51 bp, synthetic construct
  misc_feature 1..51: note = Synthetic construct
  source 1..51: mol_type = other DNA
tggagctggatccggcagcccgccgggaagggtctggagtggattggccgt

SEQ ID NO: 4736 - DNA, 51 bp, synthetic construct
  misc_feature 1..51: note = Synthetic construct
  source 1..51: mol_type = other DNA
tggagctggatccggcagtccccagggaagggactggagtggattgggtat

SEQ ID NO: 4737 - DNA, 51 bp, synthetic construct
  misc_feature 1..51: note = Synthetic construct
  source 1..51: mol_type = other DNA
tggagctggatccggcagtccccggggaggggactggagtggatgggatat

SEQ ID NO: 4738 - DNA, 51 bp, synthetic construct
  misc_feature 1..51: note = Synthetic construct
  source 1..51: mol_type = other DNA
tggagctggattcggcagcccccagggaagggactggagtggattggaatt

SEQ ID NO: 4739 - DNA, 51 bp, synthetic construct
  misc_feature 1..51: note = Synthetic construct
  source 1..51: mol_type = other DNA
tggagctgggtccgccagaccccagggaaggggctggagtggattggagag

SEQ ID NO: 4740 - DNA, 51 bp, synthetic construct
  misc_feature 1..51: note = Synthetic construct
  source 1..51: mol_type = other DNA
tggagctgggtccggcagcccccaggaaagggactggaatacattgggtat

SEQ ID NO: 4741 - DNA, 51 bp, synthetic construct
  misc_feature 1..51: note = Synthetic construct
  source 1..51: mol_type = other DNA
tggagttggatccgacagcccccaggaaagggtctggagtgggttgggtac

SEQ ID NO: 4742 - DNA, 51 bp, synthetic construct
  misc_feature 1..51: note = Synthetic construct
  source 1..51: mol_type = other DNA
tggagttggatccgccagcccccaggaagggggctggagtggattggggaa

SEQ ID NO: 4743 - DNA, 51 bp, synthetic construct
  misc_feature 1..51: note = Synthetic construct
  source 1..51: mol_type = other DNA
tggagttggatccgccagcccccagggaagggactggagtggattggagaa

SEQ ID NO: 4744 - DNA, 51 bp, synthetic construct
  misc_feature 1..51: note = Synthetic construct
  source 1..51: mol_type = other DNA
tggagttggatccgccagcccccagggaaggggctggagtggattggggaa

SEQ ID NO: 4745 - DNA, 51 bp, synthetic construct
  misc_feature 1..51: note = Synthetic construct
  source 1..51: mol_type = other DNA
tggagttggatccgccagtccccagggaaggggctggagtggattggggaa

SEQ ID NO: 4746 - DNA, 51 bp, synthetic construct
  misc_feature 1..51: note = Synthetic construct
  source 1..51: mol_type = other DNA
tggagttggatccggcagccaccaggggggagactggaatggattgggaat

SEQ ID NO: 4747 - DNA, 51 bp, synthetic construct
  misc_feature 1..51: note = Synthetic construct
  source 1..51: mol_type = other DNA
tggagttggatccggcaggccccagggaagggactggagtggattggatat

SEQ ID NO: 4748 - DNA, 51 bp, synthetic construct
  misc_feature 1..51: note = Synthetic construct
  source 1..51: mol_type = other DNA
tggagttggattcggcagcccccagggaagggactggagtggattggatat

SEQ ID NO: 4749 - DNA, 51 bp, synthetic construct
  misc_feature 1..51: note = Synthetic construct
  source 1..51: mol_type = other DNA
tggagttgggtccgccagttcccagggaaggggctggagtggattggcgaa

SEQ ID NO: 4750 - DNA, 51 bp, synthetic construct
  misc_feature 1..51: note = Synthetic construct
  source 1..51: mol_type = other DNA
tggagttgggtccggcagcccccaggaaagggactgcaatggatcggaact

SEQ ID NO: 4751 - DNA, 51 bp, synthetic construct
  misc_feature 1..51: note = Synthetic construct
  source 1..51: mol_type = other DNA
tggagttgggtccggcggcccgccggacagggactagagtggattgggcgt

SEQ ID NO: 4752 - DNA, 51 bp, synthetic construct
  misc_feature 1..51: note = Synthetic construct
  source 1..51: mol_type = other DNA
tgggcctggatccgccagccccctgggaaggggctggagtggattgggact

SEQ ID NO: 4753 - DNA, 51 bp, synthetic construct
  misc_feature 1..51: note = Synthetic construct
  source 1..51: mol_type = other DNA
tgggcctggctccgccagtccccgggcaagggactggagtggattgggagt

SEQ ID NO: 4754 - DNA, 51 bp, synthetic construct
  misc_feature 1..51: note = Synthetic construct
  source 1..51: mol_type = other DNA
tgggcttggatccggcaggccccagggaagggactggaatggcttgggagt

SEQ ID NO: 4755 - DNA, 51 bp, synthetic construct
  misc_feature 1..51: note = Synthetic construct
  source 1..51: mol_type = other DNA
tggggctggatccgccagcccccagggaagagtctggagtggattgggagt

SEQ ID NO: 4756 - DNA, 51 bp, synthetic construct
  misc_feature 1..51: note = Synthetic construct
  source 1..51: mol_type = other DNA
tggggctggatccgccagcccccagggaagggactggagtggattgggagt

SEQ ID NO: 4757 - DNA, 51 bp, synthetic construct
  misc_feature 1..51: note = Synthetic construct
  source 1..51: mol_type = other DNA
tggggctggatccgccagcccccagggaaggggctggagtggattgcaagt

SEQ ID NO: 4758 - DNA, 51 bp, synthetic construct
  misc_feature 1..51: note = Synthetic construct
  source 1..51: mol_type = other DNA
tggggctggatccgccagcccccagggaaggggctggagtggattgggagt

SEQ ID NO: 4759 - DNA, 51 bp, synthetic construct
  misc_feature 1..51: note = Synthetic construct
  source 1..51: mol_type = other DNA
tggggctggatccgccagccccccgggaaggggctggagtggattgccagt

SEQ ID NO: 4760 - DNA, 51 bp, synthetic construct
  misc_feature 1..51: note = Synthetic construct
  source 1..51: mol_type = other DNA
tggggctggatccggcagcccccaggaaagggactggagtggattgggtat

SEQ ID NO: 4761 - DNA, 51 bp, synthetic construct
  misc_feature 1..51: note = Synthetic construct
  source 1..51: mol_type = other DNA
tggggctggatccggcagcccccagggaagggactggagtggattggaagt

SEQ ID NO: 4762 - DNA, 51 bp, synthetic construct
  misc_feature 1..51: note = Synthetic construct
  source 1..51: mol_type = other DNA
tggggctggatccggcagcccccagggaagggactggagtggattgggagt

SEQ ID NO: 4763 - DNA, 51 bp, synthetic construct
  misc_feature 1..51: note = Synthetic construct
  source 1..51: mol_type = other DNA
tggggctggatccggcagcccccagggaaggggctggaatggattgggagt

SEQ ID NO: 4764 - DNA, 51 bp, synthetic construct
  misc_feature 1..51: note = Synthetic construct
  source 1..51: mol_type = other DNA
tggggctggatccggcagcccccagggaaggggctggagtggattggaaac

SEQ ID NO: 4765 - DNA, 51 bp, synthetic construct
  misc_feature 1..51: note = Synthetic construct
  source 1..51: mol_type = other DNA
tggggctggatccggcagcccccagggaaggggctggagtggattggattt

SEQ ID NO: 4766 - DNA, 51 bp, synthetic construct
  misc_feature 1..51: note = Synthetic construct
  source 1..51: mol_type = other DNA
tggggctggatccggcagcccccagggaaggggctggagtggattgggact

SEQ ID NO: 4767 - DNA, 51 bp, synthetic construct
  misc_feature 1..51: note = Synthetic construct
  source 1..51: mol_type = other DNA
tggggctggatccggcagcccccagggaaggggctggagtggattgggagt

SEQ ID NO: 4768 - DNA, 51 bp, synthetic construct
  misc_feature 1..51: note = Synthetic construct
  source 1..51: mol_type = other DNA
tggggctggatccggcagcccccagggcaggggctggagtggattggcagt

SEQ ID NO: 4769 - DNA, 51 bp, synthetic construct
  misc_feature 1..51: note = Synthetic construct
  source 1..51: mol_type = other DNA
tggggctggatccggcagccccccactcaggggctagattggattgcgact

SEQ ID NO: 4770 - DNA, 51 bp, synthetic construct
  misc_feature 1..51: note = Synthetic construct
  source 1..51: mol_type = other DNA
tggggctggatccggcagtccccagggaaggggctggagtggattgggaat

SEQ ID NO: 4771 - DNA, 51 bp, synthetic construct
  misc_feature 1..51: note = Synthetic construct
  source 1..51: mol_type = other DNA
tggggctggatccggcagtcccccgggaagggactggactggattgcaagt

SEQ ID NO: 4772 - DNA, 51 bp, synthetic construct
  misc_feature 1..51: note = Synthetic construct
  source 1..51: mol_type = other DNA
tggggctggatgcgccagcccccagggaaggggctggagtggattgggagt

SEQ ID NO: 4773 - DNA, 51 bp, synthetic construct
  misc_feature 1..51: note = Synthetic construct
  source 1..51: mol_type = other DNA
tggggctgggtccggcggcccccagggaaggggctggagtggattgggaat

SEQ ID NO: 4774 - DNA, 51 bp, synthetic construct
  misc_feature 1..51: note = Synthetic construct
  source 1..51: mol_type = other DNA
tggggctggttccggcagtccccaggggggggtctggagtggattgggaac

SEQ ID NO: 4775 - DNA, 51 bp, synthetic construct
  misc_feature 1..51: note = Synthetic construct
  source 1..51: mol_type = other DNA
tggggttggatccggcagcccccagggaagggggtggagtggatagggagt

SEQ ID NO: 4776 - DNA, 51 bp, synthetic construct
  misc_feature 1..51: note = Synthetic construct
  source 1..51: mol_type = other DNA
ttcaactgggtgcgacaggcccctggacaagggcttgagtgggtgggaggg

SEQ ID NO: 4777 - DNA, 51 bp, synthetic construct
  misc_feature 1..51: note = Synthetic construct
  source 1..51: mol_type = other DNA
ttcagctgggtgcgacaggcccctggacaaggccttgagtggataggaggg

SEQ ID NO: 4778 - DNA, 51 bp, synthetic construct
  misc_feature 1..51: note = Synthetic construct
  source 1..51: mol_type = other DNA
ttcagctgggtgcgacaggcccctggacaagggcttgagtggatgggaggc

SEQ ID NO: 4779 - DNA, 51 bp, synthetic construct
  misc_feature 1..51: note = Synthetic construct
  source 1..51: mol_type = other DNA
ttcagttgggtgcgacaggcccccggacaaggtcttgagtggatgggaggg

SEQ ID NO: 4780 - DNA, 51 bp, synthetic construct
  misc_feature 1..51: note = Synthetic construct
  source 1..51: mol_type = other DNA
ttcagttgggtgcgccaggcccctggacaagggcttgagtgggtgggatgg

SEQ ID NO: 4781 - DNA, 51 bp, synthetic construct
  misc_feature 1..51: note = Synthetic construct
  source 1..51: mol_type = other DNA
ttccactgggtccgccaggctccaggcaaggggctggagtgggtggcagtt

SEQ ID NO: 4782 - DNA, 51 bp, synthetic construct
  misc_feature 1..51: note = Synthetic construct
  source 1..51: mol_type = other DNA
ttccactgggtccgccaggctccagggaaggggctggagtgggtctcatcc

SEQ ID NO: 4783 - DNA, 51 bp, synthetic construct
  misc_feature 1..51: note = Synthetic construct
  source 1..51: mol_type = other DNA
ttccactgggtgcaacaggccccggaaaaagggcttgagtggatgggacgt

SEQ ID NO: 4784 - DNA, 51 bp, synthetic construct; identical to SEQ ID NO: 1786
  misc_feature 1..51: note = Synthetic construct
  source 1..51: mol_type = other DNA

SEQ ID NO: 4785 - DNA, 51 bp, synthetic construct
  misc_feature 1..51: note = Synthetic construct
  source 1..51: mol_type = other DNA
ttgacctggatacgcctgattcaagggaggggcctggagtgggtgtcatat

SEQ ID NO: 4786 - DNA, 51 bp, synthetic construct
  misc_feature 1..51: note = Synthetic construct
  source 1..51: mol_type = other DNA
ttgacctgggtccgccaagctccagggaaggggctggaatgggtcgctggt

SEQ ID NO: 4787 - DNA, 51 bp, synthetic construct
  misc_feature 1..51: note = Synthetic construct
  source 1..51: mol_type = other DNA
ttgagctggatccgccaggctccagggagggggctggagtgggtttcatac

SEQ ID NO: 4788 - DNA, 51 bp, synthetic construct
  misc_feature 1..51: note = Synthetic construct
  source 1..51: mol_type = other DNA
ttgcactgggtccgccaggctccaggcaaggggctggagtgggtggctgtt

SEQ ID NO: 4789 - DNA, 51 bp, synthetic construct
  misc_feature 1..51: note = Synthetic construct
  source 1..51: mol_type = other DNA
ttgcactgggtgcgacaggcccctggacaaggccttgagtggatgggatgg

SEQ ID NO: 4790 - DNA, 51 bp, synthetic construct
  misc_feature 1..51: note = Synthetic construct
  source 1..51: mol_type = other DNA
ttgcactgggtgcgacaggctcctggagaaggacttgagtggatgggaggt

SEQ ID NO: 4791 - DNA, 51 bp, synthetic construct
  misc_feature 1..51: note = Synthetic construct
  source 1..51: mol_type = other DNA
ttggcctggatccgtcagccccccggaaaggccctagagtggcttgcatta

SEQ ID NO: 4792 - DNA, 51 bp, synthetic construct
  misc_feature 1..51: note = Synthetic construct
  source 1..51: mol_type = other DNA
tttagttgggttcgacaggcccctggacaagggcttgagtggatgggtggc

SEQ ID NO: 4793 - DNA, 51 bp, synthetic construct
  misc_feature 1..51: note = Synthetic construct
  source 1..51: mol_type = other DNA
tttcactgggtccgccaggctccaggcaaggggctggagtgggtggcagtt

SEQ ID NO: 4794 - DNA, 105 bp, synthetic construct
  misc_feature 1..105: note = Synthetic construct
  source 1..105: mol_type = other DNA
ggggccctcaagagtcgaatcatcatctccctagacacgtccaagaatcagttctccctgaaactgagctctgtgaccgccgcagacacggctgtgtattactgt

SEQ ID NO: 4795 - DNA, 65 bp, synthetic construct
  misc_feature 1..65: note = Synthetic construct
  source 1..65: mol_type = other DNA
gggggaaccagttctccctgacgctgagctctgtgaccgccgcagacacggctatatattactgt

SEQ ID NO: 4796 - DNA, 85 bp, synthetic construct
  misc_feature 1..85: note = Synthetic construct
  source 1..85: mol_type = other DNA
atttggggcagtggacacgtccaagaaccagttctccctgaggctggactctgtgaccgctgcagacacggccgtgtattactgt

SEQ ID NO: 4797 - DNA, 114 bp, synthetic construct
  misc_feature 1..114: note = Synthetic construct
  source 1..114: mol_type = other DNA
aactacaacccgtccctcaagagtcgagtcaccatatcaatagacacgtccaagaagcaggtctccctgaagttgagctctgtgaacgccgcggacacggctgtgtattactgt

SEQ ID NO: 4798 - DNA, 114 bp, synthetic construct
  misc_feature 1..114: note = Synthetic construct
  source 1..114: mol_type = other DNA
aattacgcacagaagttccagggcagggtcaacatcgtcgcggacgtatacacgagcacagcctacatggaggtgaacagcctgacgcctgaggacacggctgtatatttctgc

SEQ ID NO: 4799 - DNA, 114 bp, synthetic construct
  misc_feature 1..114: note = Synthetic construct
  source 1..114: mol_type = other DNA
cattacaacccctccctcaggagtcgtgtcagcatctcactagactcgtcacagaaccaattttctctgcaattgagatctgtgacccccgcagacacggccgtgtatttctgt

SEQ ID NO: 4800 - DNA, 114 bp, synthetic construct
  misc_feature 1..114: note = Synthetic construct
  source 1..114: mol_type = other DNA
aattatgcacagaagttccagggcagagtctccatgaccacagacacatccacgaccacagcctacatggagctgaggagtctgagatctgacgactcggccgtgtactactgt

SEQ ID NO: 4801 - DNA, 114 bp, synthetic construct
  misc_feature 1..114: note = Synthetic construct
  source 1..114: mol_type = other DNA
ggtatcgcacagaagttccagggcagagtcaccatgaccagggacaggtccacgagcacagttttcctggagttgcgcagtctgagatctgacgacacggccgtctattattgt

SEQ ID NO: 4802 - DNA, 114 bp, synthetic construct
  misc_feature 1..114: note = Synthetic construct
  source 1..114: mol_type = other DNA
atgtacgcagagaaatttcagggcagagtcgcgattaccacggacgaatccacgaacacagcctacctggagctgggcggcctgaaatcagaggacacggccgtgtatttttgt

SEQ ID NO: 4803 - DNA, 114 bp, synthetic construct
  misc_feature 1..114: note = Synthetic construct
  source 1..114: mol_type = other DNA
gcatatggtacgtcgatgaagggcaggttcaccttctccagagatgattcaaggagcacggcatatcttcaaataaacagcctgaaacccgaggacacggccgtgtattattgt

SEQ ID NO: 4804 - DNA, 114 bp, synthetic construct
  misc_feature 1..114: note = Synthetic construct
  source 1..114: mol_type = other DNA
tattatgcagactccgtgaagggccgattcaccatctccagggacaactccaagaacacggtgtatctgcaaatgaacagcctgagagctgaggacacggctatgtattactgt

SEQ ID NO: 4805 - DNA, 114 bp, synthetic construct
  misc_feature 1..114: note = Synthetic construct
  source 1..114: mol_type = other DNA
tactatgcagactccgtgaagggccgtttcaccatctccagagacaattccaagaacacggtgtatttacaaatgaacagcctgcgacctgaggacacggctgtttactactgt

SEQ ID NO: 4806 - DNA, 114 bp, synthetic construct
  misc_feature 1..114: note = Synthetic construct
  source 1..114: mol_type = other DNA
tcttatgctgcgtcggtgacaggcaggttcatcatctccagagatgatcccaagaacacggcgtttctgcagatggacagtctgaaaaccgaggacacggccatatattattgt

SEQ ID NO: 4807 - DNA, 114 bp, synthetic construct
  misc_feature 1..114: note = Synthetic construct
  source 1..114: mol_type = other DNA
gactatgcctcgtcggtgagaggcaggttcaccatctccagagatgattcaaagaacacggcgtacttgcaaatgaacagcctgaagaccgaggacacggccgtctattattgt

SEQ ID NO: 4808 - DNA, 114 bp, synthetic construct
  misc_feature 1..114: note = Synthetic construct
  source 1..114: mol_type = other DNA
gtatacggtgcgtcggtgaaaggcaggttcaccatctccagagatgattcgaacaacacggcgtttctgcaaatgagcagcctgaaacccgaggacacggccctgtattattgc

SEQ ID NO: 4809 - DNA, 114 bp, synthetic construct
  misc_feature 1..114: note = Synthetic construct
  source 1..114: mol_type = other DNA
gtatatacagagaagttccagggcagagtcaccatgaccgcgaacacgtcttcagacacagccttcatggagctgagcagcctaagatctgacgacacggccttttattactgt

SEQ ID NO: 4810 - DNA, 114 bp, synthetic construct
  misc_feature 1..114: note = Synthetic construct
  source 1..114: mol_type = other DNA
acctacgcacacaagttccagggcagagtcaccatgaccagggacacgtccacgagcacagtctacatggaactgagcagattgagatctgaggacacggccgtgtattactgt

SEQ ID NO: 4811 - DNA, 114 bp, synthetic construct
  misc_feature 1..114: note = Synthetic construct
  source 1..114: mol_type = other DNA
tactttgcacagaagtttcaaggcagggtcaccatgaccagggacacgtccatcagcacagtctacatggggctgagcagcctgagatctgacgacacggccgtctattactgt

SEQ ID NO: 4812 - DNA, 114 bp, synthetic construct
  misc_feature 1..114: note = Synthetic construct
  source 1..114: mol_type = other DNA
aactatgcacagaagtttcagggcagggtcaccatgaccacagacacgtccatcagtacaacctacttggggctgaggacactgagatctgacgacacggccatattttattgt

SEQ ID NO: 4813 - DNA, 114 bp, synthetic construct
  misc_feature 1..114: note = Synthetic construct
  source 1..114: mol_type = other DNA
acgtatgcccagggcttcacaggacgatttgtcttctccttggacacctccgccactacggcatatctgcagatcaccagcctcaagcctgaggacaccgccgtatattactgc

SEQ ID NO: 4814 - DNA, 114 bp, synthetic construct
  misc_feature 1..114: note = Synthetic construct
  source 1..114: mol_type = other DNA
aagtatgcacagaaatttcagggccgtgtcaccatgaccagggacacgtccatcagcactgcctacatggatataagcagactgacatctgacgacacggccatatattactgt

SEQ ID NO: 4815 - DNA, 114 bp, synthetic construct
  misc_feature 1..114: note = Synthetic construct
  source 1..114: mol_type = other DNA
tactacgcacagaggttcgaggacagagtcaccatgaccgcagacgcgtccactaatacacttttcatggaattgagcagcctgagatctgacgacacggccatatatttctgt

SEQ ID NO: 4816 - DNA, 114 bp, synthetic construct
  misc_feature 1..114: note = Synthetic construct
  source 1..114: mol_type = other DNA
aaaatttcacagagcttgcagggcagagtcaccttgacagcggacacatccgcgaccacatcttacatggagctgagcagcctgacacttgaagacacggctttgtactactgt

SEQ ID NO: 4817 - DNA, 114 bp, synthetic construct
  misc_feature 1..114: note = Synthetic construct
  source 1..114: mol_type = other DNA
gactttgcacagaagtttcgggacagggtcaccatgaccacggacacgtccatcaccacagcctacctggacgtgaccagactgacatctgacgacacggccatttatttctgt

SEQ ID NO: 4818 - DNA, 114 bp, synthetic construct
  misc_feature 1..114: note = Synthetic construct
  source 1..114: mol_type = other DNA
aaatattcacagaacttccaggacagagtcgcctttaccagggacacatccgcgagcactgcctacatggaactgagcagcctgaggtctgaagacacgggtatctattactgt

SEQ ID NO: 4819 - DNA, 114 bp, synthetic construct
  misc_feature 1..114: note = Synthetic construct
  source 1..114: mol_type = other DNA
agatattcacagaatttccagggcagactcaccatgaccagggacacatccgcgaggacagcctacatggagctgagcagcctgacaattgaagacacggctgtgtattattgt

SEQ ID NO: 4820 - DNA, 114 bp, synthetic construct
  misc_feature 1..114: note = Synthetic construct
  source 1..114: mol_type = other DNA
aaatattcacagaccttccaggacagagtctccatcaccacggacacatccgcgaggacagcctacatggagctgagcagcctgagatccgaagacacggctgtgtattactgt

SEQ ID NO: 4821 - DNA, 114 bp, synthetic construct
  misc_feature 1..114: note = Synthetic construct
  source 1..114: mol_type = other DNA
aactatgcacagaagtttcagggcagggtcaccgtgaccagggacacgtccatcagcacagcctacatggagctgagcagtctgcgatttgacgacacggccgtatattactgt

SEQ ID NO: 4822 - DNA, 114 bp, synthetic construct
  misc_feature 1..114: note = Synthetic construct
  source 1..114: mol_type = other DNA
tcatatgcagagagattccagggaagagtcacctttgccgtcgacacgtcaacagacacagtctacatggatttgaagggcctgagatccgaggacacggccgtttattattgt

SEQ ID NO: 4823 - DNA, 114 bp, synthetic construct
  misc_feature 1..114: note = Synthetic construct
  source 1..114: mol_type = other DNA
atatatggagggaagtttcagggcagaatcaccataaccgcagacacgtctacagacacaacctacatggaactgagcagcctgacatctgaagacacggccgtctattattgt

SEQ ID NO: 4824 - DNA, 114 bp, synthetic construct
  misc_feature 1..114: note = Synthetic construct
  source 1..114: mol_type = other DNA
aaatattcacagatgttccaggacagagtcaccattaccagggacacatccgcgaacacagcctacatggaattggccagcctgagatctgaggacagggcgatatatttctgt

SEQ ID NO: 4825 - DNA, 114 bp, synthetic construct
  misc_feature 1..114: note = Synthetic construct
  source 1..114: mol_type = other DNA
ggctatgcacagaagttccagggcagagtcaccattaccaggaacacctccataagcgcagccttcatggagctgagcagcctgacacctgaggacacggccgtgtattactgt

SEQ ID NO: 4826 - DNA, 114 bp, synthetic construct
  misc_feature 1..114: note = Synthetic construct
  source 1..114: mol_type = other DNA
ggctatgcacagaagttccagggcagagtcaccatcaccaggaacaactccataggcacagcctatatggagctgagcagcctgagatctgaggacacggccgtatattattgt

SEQ ID NO: 4827 - DNA, 114 bp, synthetic construct
  misc_feature 1..114: note = Synthetic construct
  source 1..114: mol_type = other DNA
ggctatgcacagaagttccagggcagagtcaccattaccaggaacacctccataagcacagcctacatggagctgagcagcctgagatctgaggacacggccgtgtattactgt

SEQ ID NO: 4828 - DNA, 114 bp, synthetic construct
  misc_feature 1..114: note = Synthetic construct
  source 1..114: mol_type = other DNA
ggctatgcagagaacttccagggcagagtcaccattaccaggaacacctccataagcacagcctacctggaggtgagcagcctaagatctgaggacacggccgtctattactgt

SEQ ID NO: 4829 - DNA, 114 bp, synthetic construct
  misc_feature 1..114: note = Synthetic construct
  source 1..114: mol_type = other DNA
ggctatgcacagaagttccgcggcagagtcaccattaccaggaacacctctacaaacacgacctacatggagctgaccagcctgacatctgacgacacggccgtgtattactgt

SEQ ID NO: 4830 - DNA, 114 bp, synthetic construct
  misc_feature 1..114: note = Synthetic construct
  source 1..114: mol_type = other DNA
ggctatgcacagaagttccagggcagactcaccatttccagggacacctccataagcacagcctacatggagctgagcaacctgagatctgaggacacggccgtgtattactgc

SEQ ID NO: 4831 - DNA, 114 bp, synthetic construct
  misc_feature 1..114: note = Synthetic construct
  source 1..114: mol_type = other DNA
aactacgcacagaactttcagggcagagtcacaatcaccacggacgaatccacgagcacaacctacatggagctgagcagcctgagatctgaggacacggccgtgtatttttgt

SEQ ID NO: 4832 - DNA, 114 bp, synthetic construct
  misc_feature 1..114: note = Synthetic construct
  source 1..114: mol_type = other DNA
aactacgcacggaagttccagggcagagtcacgattaccgcggacgaatccacgaacacagtctacatggacttgcgcagcctgacgtctgaagacacggccacatacttctgt

SEQ ID NO: 4833 - DNA, 114 bp, synthetic construct
  misc_feature 1..114: note = Synthetic construct
  source 1..114: mol_type = other DNA
ggctatgcacagaagttccagggcagagtcaccattaccagggactcctccataagcacagcctacatggatctgagcagcctgagatctgaggacacggccgtgtattactgt

SEQ ID NO: 4834 - DNA, 114 bp, synthetic construct
  misc_feature 1..114: note = Synthetic construct
  source 1..114: mol_type = other DNA
aactatgcacagaagctccagggcagagtcaccatgaccacagacacatccacgaagacagcctacatggagctgaggagcctgagatctgacgacacggccgtgtattactgt

SEQ ID NO: 4835 - DNA, 114 bp, synthetic construct
  misc_feature 1..114: note = Synthetic construct
  source 1..114: mol_type = other DNA
aactacgcacagaagttccagggcagagtcacgattaccgcggacgaatccatgaacacagtctacatggagctcagcagcctgagatctgaagacacggccgtctattattgt

SEQ ID NO: 4836 - DNA, 114 bp, synthetic construct; identical to SEQ ID NO: 1790
  misc_feature 1..114: note = Synthetic construct
  source 1..114: mol_type = other DNA

SEQ ID NO: 4837 - DNA, 114 bp, synthetic construct
  misc_feature 1..114: note = Synthetic construct
  source 1..114: mol_type = other DNA
acctatgcccaggacttcacaggacggtttgacttctccttggattcctctgcgagcacggcatatctgcagatcagcagtctccaggctgacgacactgccatctattactgt

SEQ ID NO: 4838 - DNA, 114 bp, synthetic construct
  misc_feature 1..114: note = Synthetic construct
  source 1..114: mol_type = other DNA
acctacgcacagaaattccagggcagagtcacctttaccacggacgtgtctacgagtacagactacctggagctgagcagcctgagatctgacgacacggccgtctattactgt

SEQ ID NO: 4839 - DNA, 114 bp, synthetic construct
  misc_feature 1..114: note = Synthetic construct
  source 1..114: mol_type = other DNA
aactacgcacagaagttgcaggacagagtcacgattaccacggacgaatccacgaccacagcctacatggagctgcgcagcctgacatctgaggacacggccatgtattactgt

SEQ ID NO: 4840 - DNA, 114 bp, synthetic construct
  misc_feature 1..114: note = Synthetic construct
  source 1..114: mol_type = other DNA
gactacgcacagaagttccagggcagagtcacgattaacacggacgaatccacgagcacagcctacatggaactgagtagcctgagatctgaggacacggccgtctattactgt

SEQ ID NO: 4841 - DNA, 114 bp, synthetic construct
  misc_feature 1..114: note = Synthetic construct
  source 1..114: mol_type = other DNA
aagtatgcacagaagttccaggacagagtcaccttgaccaccgacacatcttcgagcacagcctacatggaactgagggagttgagagttgacgacacggccctgtattattgt

SEQ ID NO: 4842 - DNA, 114 bp, synthetic construct
  misc_feature 1..114: note = Synthetic construct
  source 1..114: mol_type = other DNA
aactatgcacagaagttccagggcagagtcgccttgaccacagacacatccacgagcacagcctacatggagctgaggagcctgagatctgacgacacggccgtgtattactgt

SEQ ID NO: 4843 - DNA, 114 bp, synthetic construct
  misc_feature 1..114: note = Synthetic construct
  source 1..114: mol_type = other DNA
aactccgcagagaagttccaggacagagtcacgattaccgcggacgaatccacgagcacagcctacatggagctgagcagcctgagatctgatgacacggccgtgtattactgt

SEQ ID NO: 4844 - DNA, 114 bp, synthetic construct
  misc_feature 1..114: note = Synthetic construct
  source 1..114: mol_type = other DNA
aattatgcacagaagttccaggacagaaccaccatgaccacagacacatccacgaacacagcctacatggagctgaggagcctgagatctgacgacacggccgtatattactgt

SEQ ID NO: 4845 - DNA, 114 bp, synthetic construct
  misc_feature 1..114: note = Synthetic construct
  source 1..114: mol_type = other DNA
aactatgcacagaacctccagggcagagtcaccatgaccgcagacacatccacgcgcacagcctacatggaactgaggagcctgagatttgacgacgcggccgtctattactgt

SEQ ID NO: 4846 - DNA, 114 bp, synthetic construct
  misc_feature 1..114: note = Synthetic construct
  source 1..114: mol_type = other DNA
aactacgaacagaagttgcagggcagagtcacgattaccgcggacggatctacgggcacagcctacatggagctgagaaacctgacatatgaggacacggccgtctattattgt

SEQ ID NO: 4847 - DNA, 114 bp, synthetic construct
  misc_feature 1..114: note = Synthetic construct
  source 1..114: mol_type = other DNA
aactacgcccagaagtttcagggaagggtgacaatttctgcagacaaaagtaccaatacagcctatatggagctgtcaagcctgcgctctgaagataccgccgtgtactattgt

SEQ ID NO: 4848 - DNA, 114 bp, synthetic construct
  misc_feature 1..114: note = Synthetic construct
  source 1..114: mol_type = other DNA
aactacgcccagaagtttcagggaagggtgacaatttctgcagacaaaagtaccaatacagcctatatggacctgtcaagcctgcgctctgaagataccgccgtgtactattgt

SEQ ID NO: 4849 - DNA, 114 bp, synthetic construct
  misc_feature 1..114: note = Synthetic construct
  source 1..114: mol_type = other DNA
aactacgcccagaagtttcagggaagggtgacaatttctgcagacaaaagtaccaatacagcctatatggagctgtcaagcctgcactctgaagataccgccgtgtactattgt

SEQ ID NO: 4850 - DNA, 114 bp, synthetic construct
  misc_feature 1..114: note = Synthetic construct
  source 1..114: mol_type = other DNA
aactacgcccagaagtttcagggaagggtgacaatttctgcagacaaaagtaccaatacagcctatatggagctgtcaagcctgcattctgaagataccgccgtgtactattgt

SEQ ID NO: 4851 - DNA, 114 bp, synthetic construct
  misc_feature 1..114: note = Synthetic construct
  source 1..114: mol_type = other DNA
aactacgcccagaagtttcagggaagggtgacaatttctgcagacaaaagtaccaatacagcctatatggagctgtcaagcctgcgctctgaagataccgccgtgtacttttgt

SEQ ID NO: 4852 - DNA, 114 bp, synthetic construct
  misc_feature 1..114: note = Synthetic construct
  source 1..114: mol_type = other DNA
aacttcgcacagaagttccagggcagagtcacgattagtacggacgacctcgctaggacagtgtacatggagctgagcagcctgagatctgacgacacggccgtatactactgc

SEQ ID NO: 4853 - DNA, 114 bp, synthetic construct
  misc_feature 1..114: note = Synthetic construct
  source 1..114: mol_type = other DNA
aactatgcacagaatctgtacgacagagtcagcatgaccacagacacaaccacgaacacagccgacatggagctgaggagcctgacatctgacgacacggccgtgtattactgt

SEQ ID NO: 4854 - DNA, 114 bp, synthetic construct
  misc_feature 1..114: note = Synthetic construct
  source 1..114: mol_type = other DNA
aactatgcacagaagtttcagggcagagtcacgattaccgcggacgaatcttcgagcacagtctacattgaagtgagcagactgagatctgaggacacggccgtgtattactgt

SEQ ID NO: 4855 - DNA, 114 bp, synthetic construct
  misc_feature 1..114: note = Synthetic construct
  source 1..114: mol_type = other DNA
acttatgcacaagagttccagggcagagtcacgattaattcggacgaatccacgaccacagcctttatggaactgaacagcctgagatctgaggacacggccgtgtattactgt

SEQ ID NO: 4856 - DNA, 114 bp, synthetic construct
  misc_feature 1..114: note = Synthetic construct
  source 1..114: mol_type = other DNA
aactacgcgcagaagttccagggcagagtcacgataaccgcggacgtatccacgaatacagtctacatggagatcagcagcctgagatctgaggacacggccgtgtattactgt

SEQ ID NO: 4857 - DNA, 114 bp, synthetic construct
  misc_feature 1..114: note = Synthetic construct
  source 1..114: mol_type = other DNA
aactacgcacagaagttccagggcagagtcacgattaccacggacgaatccacgagcacagcctacatggagttgagcagcctgagatctgaggacacggccgtgtattactgt

SEQ ID NO: 4858 - DNA, 114 bp, synthetic construct
  misc_feature 1..114: note = Synthetic construct
  source 1..114: mol_type = other DNA
aactacgcacagaagttccagggcagagtcacgattaccacggacgaatccacgagcacagcctacatggagctgagcagcctgagatctgaggacacggccgtgtattactgt

SEQ ID NO: 4859 - DNA, 114 bp, synthetic construct
  misc_feature 1..114: note = Synthetic construct
  source 1..114: mol_type = other DNA
gagtacgcacagaagttccagggcagagtcacgattaccacggacgaatccacgagcacagcctacatggacctgagtagcctgagatctgaggacacggccgtgtatttctgt

SEQ ID NO: 4860 - DNA, 114 bp, synthetic construct
  misc_feature 1..114: note = Synthetic construct
  source 1..114: mol_type = other DNA
aactacgcacagaagttccagggcagagtcacgattaccacggacgaatccacgaagacagcctacatggagctgagcagcctgagatctgaggacacggccgtgtattactgt

SEQ ID NO: 4861 - DNA, 114 bp, synthetic construct
  misc_feature 1..114: note = Synthetic construct
  source 1..114: mol_type = other DNA
gtctatgcacagaacctccagggcagagtcaccgtgaccgtagacacatccacgagcacagtctacatggagctgaggagccttagatctgacgacacggccgtctattactgt

SEQ ID NO: 4862 - DNA, 114 bp, synthetic construct
  misc_feature 1..114: note = Synthetic construct
  source 1..114: mol_type = other DNA
aactatggacagaaattccagggcagagtcaccatgaccacagacacatcgacgagtacagcctacatggaactgaggagcctgagatctgacgacacggccgtgtattattgt

SEQ ID NO: 4863 - DNA, 114 bp, synthetic construct
  misc_feature 1..114: note = Synthetic construct
  source 1..114: mol_type = other DNA
aactatgcacagaaggtccagggcagagtcaccatgaccacagacacatccacgagcacagcctatatggagctgagtagcctgagatctgacgacacggccgtgtattactgt

SEQ ID NO: 4864 - DNA, 114 bp, synthetic construct
  misc_feature 1..114: note = Synthetic construct
  source 1..114: mol_type = other DNA
aactatgcacagaagctccagggcagagtcaccatgaccacagacacatccacgagcacagcctacatggagctgaggagcctgagatctgacgacacggccgtgtattactgt

SEQ ID NO: 4865 - DNA, 114 bp, synthetic construct
  misc_feature 1..114: note = Synthetic construct
  source 1..114: mol_type = other DNA
aactatgcacagaaactccagggcagagtcaccatgaccacagacacatccacgagtacagcctacatggagctgacgagcctgaaatctgacgacacggccgtgtattactgt

SEQ ID NO: 4866 - DNA, 114 bp, synthetic construct
  misc_feature 1..114: note = Synthetic construct
  source 1..114: mol_type = other DNA
aattatgcagtgaatttccaggacagagtcaccctcaccacggacgaatccacgaacactgcctacatggaactgagcgaccttaaatctgacgacacggccgtctatttctgt

SEQ ID NO: 4867 - DNA, 114 bp, synthetic construct
  misc_feature 1..114: note = Synthetic construct
  source 1..114: mol_type = other DNA
aactatgcacagaaactccagggcagagtcaccatgaccacagacacatccacgagcacggcctacatggagctgaggagcctgagatctgacgacacggccctgtattactgt

SEQ ID NO: 4868 - DNA, 114 bp, synthetic construct
  misc_feature 1..114: note = Synthetic construct
  source 1..114: mol_type = other DNA
gagtacgcacagagtttccaggacagactcacgattacggcggacaagtccacgaacaccgtgtacatggacttgagtagcctgacatctgaggacacggccgtttacttctgt

SEQ ID NO: 4869 - DNA, 114 bp, synthetic construct
  misc_feature 1..114: note = Synthetic construct
  source 1..114: mol_type = other DNA
cactacgcacagaagttccagggcagagttacgattaccgcggacgaatccacgagcacagcctacatggagctgaccagcctgacatctgaagacacggccctttattactgt

SEQ ID NO: 4870 - DNA, 114 bp, synthetic construct
  misc_feature 1..114: note = Synthetic construct
  source 1..114: mol_type = other DNA
aattatgcacagaggatccaggacagagtcaccatgaccacagacacatcaacggacacagtctacatggacttgaggagcctgacatctgacgacacggccgtctattactgt

SEQ ID NO: 4871 - DNA, 114 bp, synthetic construct
  misc_feature 1..114: note = Synthetic construct
  source 1..114: mol_type = other DNA
aactacgcacagaagttccggggcagagtcacgataaccaaggacgaatccacgagcacagcctacatggagctgagcagcctgagatatgaagacacggccgtctattactgt

SEQ ID NO: 4872 - DNA, 114 bp, synthetic construct
  misc_feature 1..114: note = Synthetic construct
  source 1..114: mol_type = other DNA
gataaggcacagaagttccagggcagagtcacatttaccgcggacgactccacgagcacggcctacatggaattgagcagcctgagatctgaagacacggccgtctattactgt

SEQ ID NO: 4873 - DNA, 114 bp, synthetic construct
  misc_feature 1..114: note = Synthetic construct
  source 1..114: mol_type = other DNA
acttacgcagagaagtttaagggcagagtcaccttgaccacagacacatccacgaccacagcctacatggaactgaggagcctgagatctgacgacacggccatatacttctgt

SEQ ID NO: 4874 - DNA, 114 bp, synthetic construct
  misc_feature 1..114: note = Synthetic construct
  source 1..114: mol_type = other DNA
aacaacgcacagaaattccaggccagagtcacccttaccgcggacgaagcaacgaacacagcctacatggagctgagcagcctccaatttgaggacactgccatatattactgt

SEQ ID NO: 4875 - DNA, 114 bp, synthetic construct
  misc_feature 1..114: note = Synthetic construct
  source 1..114: mol_type = other DNA
aactatgtccagagtctccagggcagagtcacaatgaccacagacacagccacgaacacagcctacatggagctgaggagcctgcgatctgacgacacggccgtctatttctgt

SEQ ID NO: 4876 - DNA, 114 bp, synthetic construct
  misc_feature 1..114: note = Synthetic construct
  source 1..114: mol_type = other DNA
aactatgcacagaggctccagggcagagtcaccatgaccacagatacatccacgaacacagcctacatggagctgaggagcctgagatctgacgacacggccgtgtattactgt

SEQ ID NO: 4877 - DNA, 114 bp, synthetic construct
  misc_feature 1..114: note = Synthetic construct
  source 1..114: mol_type = other DNA
cactacgcgcaggacttccagggcagagtcaccattacttcggacgaatcgacgagctcagcctacatgcagttgagcagcctcaggtctgacgacacggccgtatacttctgt

SEQ ID NO: 4878 - DNA, 114 bp, synthetic construct
  misc_feature 1..114: note = Synthetic construct
  source 1..114: mol_type = other DNA
acctatgccccgggcttcagaggacggattgtcttgtccttaaacacttctgtcaattcggcttacctacaaatcgacaacgtaaggcctgaggacactgccgtctatttctgt

SEQ ID NO: 4879 - DNA, 114 bp, synthetic construct
  misc_feature 1..114: note = Synthetic construct
  source 1..114: mol_type = other DNA
ctttttgcagagagtttccatgacagaatcgccataaccgcggacacgtccacagccaccgccttcatggaattgaggagcctgagatctgaggacacggccgtgtattattgt

SEQ ID NO: 4880 - DNA, 114 bp, synthetic construct
  misc_feature 1..114: note = Synthetic construct
  source 1..114: mol_type = other DNA
tactacgcagactccgttaagggacgattcactttgtccagagacaactccaagagtacagtgttcctgaagatgaacagtctgagaattgaggacacgggtgtgtattactgt

SEQ ID NO: 4881 - DNA, 114 bp, synthetic construct
  misc_feature 1..114: note = Synthetic construct
  source 1..114: mol_type = other DNA
aaatatgcagagaagttccggggcagagtcaccataaccgcagacacatctacaaacacagcctacatggaattgagcagcctgagatttgaggacacggccatttattactgt

SEQ ID NO: 4882 - DNA, 114 bp, synthetic construct
  misc_feature 1..114: note = Synthetic construct
  source 1..114: mol_type = other DNA
aagtacggaaagaacatccccgacagagtcacgattaccgcggacgaatcgtcgagcacagcctatttggagatgagctccctgagatctgaagacacggccatttattactgt

SEQ ID NO: 4883 - DNA, 114 bp, synthetic construct
  misc_feature 1..114: note = Synthetic construct
  source 1..114: mol_type = other DNA
tcctacgcagggaggttccagggcagagtcaccctgaccagggacacgtctagaaacacagtctacatggaactgagcagcctgacttctgaggacacggccgtatattactgt

SEQ ID NO: 4884 - DNA, 114 bp, synthetic construct
  misc_feature 1..114: note = Synthetic construct
  source 1..114: mol_type = other DNA
aactatgcacagaagtttcagggcaggatcaccatggccagggacacgtccatcatcacagcctacatggacctgagcaggctgaaatctgacgacacggccgtctattactgt

SEQ ID NO: 4885 - DNA, 114 bp, synthetic construct
  misc_feature 1..114: note = Synthetic construct
  source 1..114: mol_type = other DNA
aagtattcgcagacctttcagggcagggtcaccatgaccagggacacgtccatcagcacagcctacatggagctgagcaggctgagatctgacgatacggccttctattactgt

SEQ ID NO: 4886 - DNA, 114 bp, synthetic construct
  misc_feature 1..114: note = Synthetic construct
  source 1..114: mol_type = other DNA
ctctacgcacagatgttccagggcagagtcaccatgaccgaggactcaactggtgccacagccgacctggagctgagcagcctgacatctgaggacacggccgtctattactgt

SEQ ID NO: 4887 - DNA, 114 bp, synthetic construct
  misc_feature 1..114: note = Synthetic construct
  source 1..114: mol_type = other DNA
atctccgcacagaaattccaggccagagtcaccatgaccgcggacggatcttcagacacagcctacatggaactgagtagcctaagatctgaggacacggccgtctattactgt

SEQ ID NO: 4888 - DNA, 114 bp, synthetic construct
  misc_feature 1..114: note = Synthetic construct
  source 1..114: mol_type = other DNA
tactttccgcagaagttccagggcagagtctccattaacagggacacctccataaccaccgcctatatggaactgaagagcctgacatctgaagacacggccgtctactactgt

SEQ ID NO: 4889 - DNA, 114 bp, synthetic construct
  misc_feature 1..114: note = Synthetic construct
  source 1..114: mol_type = other DNA
gacttcccaccgaaatttaagggccgagtctccatgaatagggacacgtccacgaatacagcccacttggacctgaacagcctgagatctgaggacacggccatctattattgt

SEQ ID NO: 4890 - DNA, 114 bp, synthetic construct
  misc_feature 1..114: note = Synthetic construct
  source 1..114: mol_type = other DNA
gaatatgcaccgaagtttcagggcagactcaacattctcgcggaacagtctacgcgaacagtctacatggaactgagtggcctgtcacgtgacgacacggccatttattactgt

SEQ ID NO: 4891 - DNA, 114 bp, synthetic construct
  misc_feature 1..114: note = Synthetic construct
  source 1..114: mol_type = other DNA
aaatactcacagatgttccagggcagagtcaccattaccaccgatacatccgcgagcacagcctacatggagctgagcagcctgagatatgaagacacggctgtgtattattgt

SEQ ID NO: 4892 - DNA, 114 bp, synthetic construct
  misc_feature 1..114: note = Synthetic construct
  source 1..114: mol_type = other DNA
agatacagcccgtccttccaaggccaggtcaccatctcagccgacaagtccatcagcaccgcctacctgcagtggagcagcctgaaggcctcggacaccgccatgtattactgt

SEQ ID NO: 4893 - DNA, 114 bp, synthetic construct
  misc_feature 1..114: note = Synthetic construct
  source 1..114: mol_type = other DNA
agatacagcccgtccttccgaggccaggtcaccatctcagccgacaagtccaacaacaccgcccacctgcagtggagcagcctgaaggcctcggacaccgccatttattattgt

SEQ ID NO: 4894 - DNA, 114 bp, synthetic construct
  misc_feature 1..114: note = Synthetic construct
  source 1..114: mol_type = other DNA
agatacagcccgtccttccaaggcctggtcaccatctcagccgacaagtccaccacgaccgcctacctgcagtggggcagcctgaaggcctcggacaccgccatgtattattgt

SEQ ID NO: 4895 - DNA, 114 bp, synthetic construct
  misc_feature 1..114: note = Synthetic construct
  source 1..114: mol_type = other DNA
agatatggcccgtccttccaaggccaggtcagcatttcagccgacaagtccaagagcaccgcctacttgcagtggggcagcctgaaggcctcggacagcgccatgtattactgt

SEQ ID NO: 4896 - DNA, 114 bp, synthetic construct
  misc_feature 1..114: note = Synthetic construct
  source 1..114: mol_type = other DNA
agatacagcccgtccttccaaggccaggtcctcatctcagccgacaagtccagcagcaccgcctacctacagtggagcagcctgaaggcctcggacaccgccatgttttactgt

SEQ ID NO: 4897 - DNA, 114 bp, synthetic construct
  misc_feature 1..114: note = Synthetic construct
  source 1..114: mol_type = other DNA
agatacagcccgtccttccaaggccaggtcaccatctcagccgacaagtccatcaataccgcctacctgcaatggagtagcctgaaggcctcggacagcgccatttattactgt

SEQ ID NO: 4898 - DNA, 114 bp, synthetic construct
  misc_feature 1..114: note = Synthetic construct
  source 1..114: mol_type = other DNA
agatacagtccgtccttgcaaggccaggtcatcatctcagtcgacacctcaataaataccgcctacctacattgggacagcctgaaggcctcggacaccgccatatattactgt

SEQ ID NO: 4899 - DNA, 114 bp, synthetic construct
  misc_feature 1..114: note = Synthetic construct
  source 1..114: mol_type = other DNA
agatacagcccgtccttcgaaggccaggtcaccgtctcagtcgacaagtccatcagcaccgcctacctgcagtggagcagcctgaaggcctcggacagcgccatgtatttctgt

SEQ ID NO: 4900 - DNA, 114 bp, synthetic construct
  misc_feature 1..114: note = Synthetic construct
  source 1..114: mol_type = other DNA
agatacagtccgtccttccaaggccaggtcaccatgtcagccgacaggtccgtcaacaccgcctacctgcagtggagcagcctgaaggcctcggacaccgccatgtattactgt

SEQ ID NO: 4901 - DNA, 114 bp, synthetic construct
  misc_feature 1..114: note = Synthetic construct
  source 1..114: mol_type = other DNA
agatacagcccgtccttccaaggccaggtcaccatctcagtcgacacgtccatcaacaccgcctacctgcactggagcagcctgaaggcctcggacaccgccatgtattactgt

SEQ ID NO: 4902 - DNA, 114 bp, synthetic construct
  misc_feature 1..114: note = Synthetic construct
  source 1..114: mol_type = other DNA
agatacaacccgtccttccaaggccaggtcaccatctcagccgacaagtccatcagcaccgcctacctgcagtggaacaacctgaaggcctcggacaccgccatgtattgctgt

SEQ ID NO: 4903 - DNA, 114 bp, synthetic construct
  misc_feature 1..114: note = Synthetic construct
  source 1..114: mol_type = other DNA
agatggagtccgtccttccaaggccaggtcaccctctcagtcgacaagtccgtcaacaccgcctacctgcagtggaacaacttgagggcctcggacaccgccatgtatttttgt

SEQ ID NO: 4904 - DNA, 114 bp, synthetic construct
  misc_feature 1..114: note = Synthetic construct
  source 1..114: mol_type = other DNA
agatatagtccgtccttcgaaggccaggtcaccatctcagccgacaagtccatcagcaccgcctacctgcagtggagcagcctgaaggcctcggacaccgccatctattactgt

SEQ ID NO: 4905 - DNA, 114 bp, synthetic construct
  misc_feature 1..114: note = Synthetic construct
  source 1..114: mol_type = other DNA
atatacagcccgtccttccagggccaggtcaccatctcagccgacaagtccatcagcaccgcctacctgcagtggagcagtctgaaggcctcggacaccgccatgtattattgt

SEQ ID NO: 4906 - DNA, 114 bp, synthetic construct
  misc_feature 1..114: note = Synthetic construct
  source 1..114: mol_type = other DNA
agatacagcccgtccttccaaggtcaggtcaccatctcagccgacaagtccatcagcaccgcctacctgcagtggagtagcctgaaggcctcggacaccgccatttattactgt

SEQ ID NO: 4907 - DNA, 114 bp, synthetic construct
  misc_feature 1..114: note = Synthetic construct
  source 1..114: mol_type = other DNA
acatacagcccggccttccaaggccaggtcaccatctcagccgacaagtccatcagaaccgcctatttgcagtggagcagcctgaaggcctcggacaccgccatgtattactgt

SEQ ID NO: 4908 - DNA, 114 bp, synthetic construct
  misc_feature 1..114: note = Synthetic construct
  source 1..114: mol_type = other DNA
agatacagcccgtccttccaaggccaggtcaccatctcagccgacaagtccatcagcaccgcctacctgcagtggggcagcctgaaggcctcggacaccgccatgtattactgt

SEQ ID NO: 4909 - DNA, 114 bp, synthetic construct
  misc_feature 1..114: note = Synthetic construct
  source 1..114: mol_type = other DNA
atatatagcccgtccttccaaggccgggtcactctctcagtcgacaagtccatcagcaccgcctacctacagtggagcagcctggaggcctcggacaccgccatatattactgt

SEQ ID NO: 4910 - DNA, 114 bp, synthetic construct
  misc_feature 1..114: note = Synthetic construct
  source 1..114: mol_type = other DNA
aaatatagcccgtccttccaaggccaggtcaacatctcagccgacaagtccatcagcaccgcctacctgcagtggagcagcctgaaggcctcggacaccgccatgtattactgt

SEQ ID NO: 4911 - DNA, 114 bp, synthetic construct
  misc_feature 1..114: note = Synthetic construct
  source 1..114: mol_type = other DNA
agatacagtccgtccttccaaggccaggtcaccatctcagtcgacaagtccaccagcaccgcctacctgcagtggagcagcctgaaggcctcggacagcgccatgtattactgt

SEQ ID NO: 4912 - DNA, 114 bp, synthetic construct
  misc_feature 1..114: note = Synthetic construct
  source 1..114: mol_type = other DNA
agatacagcccgaccttccacggccaggtctccatctcagccgacaggtccatcaataccgtctacttgcagtggagcagtctgaaggcctcggacaccgccatgtattactgt

SEQ ID NO: 4913 - DNA, 114 bp, synthetic construct
  misc_feature 1..114: note = Synthetic construct
  source 1..114: mol_type = other DNA
agatacagcccgtccttccaaggccaggtcaccatctcagccgacaagtccatcagcaccgcctacctgcagtggaccagcctgaaggcctcggacaccgccatgtattactgt

SEQ ID NO: 4914 - DNA, 114 bp, synthetic construct
  misc_feature 1..114: note = Synthetic construct
  source 1..114: mol_type = other DNA
agatacagcccgtccttccaaggcgaggtcgccatctcagccgacaactccatcagcaccgcctacctgcaatggagcagcctgaaggcctcggacaccgccatgtactactgt

SEQ ID NO: 4915 - DNA, 114 bp, synthetic construct
  misc_feature 1..114: note = Synthetic construct
  source 1..114: mol_type = other DNA
agagtcagcccgtccttccaaggccaggtcaccatctcagccgacaagtccatcagaaccgcctacctgcagtggagcagcctgaaggcctcggacaccgccatgttttactgt

SEQ ID NO: 4916 - DNA, 114 bp, synthetic construct
  misc_feature 1..114: note = Synthetic construct
  source 1..114: mol_type = other DNA
agatataacccgtccttccacggccaaggcaccatctcagccgacaggtccagcagcgtcgcctacttggagtggagcagcctgagggcctcggacaccgccatgtacttctgt

SEQ ID NO: 4917 - DNA, 114 bp, synthetic construct
  misc_feature 1..114: note = Synthetic construct
  source 1..114: mol_type = other DNA
aaaatttcacagaaattccagggcagagtcaccatcaccagggacaaatccgcgaacacagcccacctggaggtgagaagactgagtcacgaagacacggctctatattactgt

SEQ ID NO: 4918 - DNA, 114 bp, synthetic construct
  misc_feature 1..114: note = Synthetic construct
  source 1..114: mol_type = other DNA
aactacgctgagaagtttaagggcagagtcacaattacgacggacgaatccacgacgacaacctacatggaactaaacagtttgacatctgaagacacggccgtctatttctgt

SEQ ID NO: 4919 - DNA, 114 bp, synthetic construct
  misc_feature 1..114: note = Synthetic construct
  source 1..114: mol_type = other DNA
tactacgcagactctgttatgggccgattcaccatctccagagacaacgccaagaattcagtgtttctgcaaatgaacagcctgagagccgcggacacggctgtatattattgt

SEQ ID NO: 4920 - DNA, 114 bp, synthetic construct
  misc_feature 1..114: note = Synthetic construct
  source 1..114: mol_type = other DNA
tactacgcagcctccgtgaagggccggttcaccatttccagagacaattccaagaacaggctatatctacaaatgaacagccttagagccgaggacacggccgtatattactgt

SEQ ID NO: 4921 - DNA, 114 bp, synthetic construct
  misc_feature 1..114: note = Synthetic construct
  source 1..114: mol_type = other DNA
tattatgcagactctgtgaggggccgattcaccatctccagagacaacgccaagaattccctggctctgcagatgaacagcctgagagtcgaggacacgggtgtttatttttgt

SEQ ID NO: 4922 - DNA, 114 bp, synthetic construct
  misc_feature 1..114: note = Synthetic construct
  source 1..114: mol_type = other DNA
gactacgctgcacccgtgaaaggcagattcaccatctcaagagatgattcagaaaacacgttgtttctgcaaatgaacagcctgaaaaccgacgacacagccgtgtattactgt

SEQ ID NO: 4923 - DNA, 114 bp, synthetic construct
  misc_feature 1..114: note = Synthetic construct
  source 1..114: mol_type = other DNA
cattatggagactctgtgaagggccgattcaccatctccagagacaacgccaagaactctctctatctgcacatgaacaacctgagagccgaggacacggctgtttatttctgt

SEQ ID NO: 4924 - DNA, 114 bp, synthetic construct
  misc_feature 1..114: note = Synthetic construct
  source 1..114: mol_type = other DNA
aactacgcagactcagtgaagggccgattcaccgtctccagagacaacgccaagaactcactgtatctgcagatgaacagcctgagagccgaggacacggctgtgtattactgt

SEQ ID NO: 4925 - DNA, 114 bp, synthetic construct
  misc_feature 1..114: note = Synthetic construct
  source 1..114: mol_type = other DNA
tactacgcagactccgtgaagggccggttcaccatctccagagacaattccaagaacacgctgtatctgcaagtgaacagcctgagagccgaggacacggccgtatattactgt

SEQ ID NO: 4926 - DNA, 114 bp, synthetic construct
  misc_feature 1..114: note = Synthetic construct
  source 1..114: mol_type = other DNA
tactacgcagactctatgaagggccgattcaccatctccagagacaacgccaagaactcactgtatctgcaaatgaagaccctgagagccgaggacacggctgtctattactgt

SEQ ID NO: 4927 - DNA, 114 bp, synthetic construct
  misc_feature 1..114: note = Synthetic construct
  source 1..114: mol_type = other DNA
tactacgcagactccgtgaggggccggttcaccatctccagagacaattccaagaacacgctgtatctggacatgaagagcctgagagacgaggacacggccatatattactgt

SEQ ID NO: 4928 - DNA, 114 bp, synthetic construct
  misc_feature 1..114: note = Synthetic construct
  source 1..114: mol_type = other DNA
tactacgcagactccgtggagggccggttcaccatctccagagacaattccaagaaaatcctgtatctgcaaattaacagcctgagagtcgaggacacggccgtatattactgt

SEQ ID NO: 4929 - DNA, 114 bp, synthetic construct
  misc_feature 1..114: note = Synthetic construct
  source 1..114: mol_type = other DNA
tactacgcagactccgcgaagggccggttcaccatctccagagacaattccaagaatacgctgtatctgcaaatgaacagcctgagagccgaggacacggccgtatattactgt

SEQ ID NO: 4930 - DNA, 114 bp, synthetic construct
  misc_feature 1..114: note = Synthetic construct
  source 1..114: mol_type = other DNA
tcctacgcagactccgtgaagggccgattcaccatctccagagacaacgccaagaactcactttatctggacatgaacagcgtgagagtcgaggacacggctgtttattactgt

SEQ ID NO: 4931 - DNA, 114 bp, synthetic construct
  misc_feature 1..114: note = Synthetic construct
  source 1..114: mol_type = other DNA
gactacgcagcctcagtgaagggccgcttcaccatctccagagacaacgccaagaacttactgtatcttcaaatgaacagcctgagggacgaggacgcggctgtgtattactgt

SEQ ID NO: 4932 - DNA, 114 bp, synthetic construct
  misc_feature 1..114: note = Synthetic construct
  source 1..114: mol_type = other DNA
tactacgcagactcactgaagggccgactgaccatctccagagacaacgccaagaaaacactgtttctgcaaatgaacagcctgagagccgaagacacggctgtgtattactgt

SEQ ID NO: 4933 - DNA, 114 bp, synthetic construct
  misc_feature 1..114: note = Synthetic construct
  source 1..114: mol_type = other DNA
aactacgcagactcagtgaagggccgagtctccatctccagagacaacgccaagaactcactgtatctgcaaatgaacagcctgacagccgaggacacggctctgtattactgt

SEQ ID NO: 4934 - DNA, 114 bp, synthetic construct
  misc_feature 1..114: note = Synthetic construct
  source 1..114: mol_type = other DNA
gactacgcagagtcagtgaagggccgattcaccatttccagagacaacgccaagaactcactgtatctgcaaatgaatagcctgacagccgaggactcggctgtatatttctgt

SEQ ID NO: 4935 - DNA, 114 bp, synthetic construct
  misc_feature 1..114: note = Synthetic construct
  source 1..114: mol_type = other DNA
tactacgcagactctgtgaagggccgttttaccatctccagagacaacgccaagaactcactgcatctgcaaatgaacagcctgagagccgaggacacgggtatatattactgt

SEQ ID NO: 4936 - DNA, 114 bp, synthetic construct
  misc_feature 1..114: note = Synthetic construct
  source 1..114: mol_type = other DNA
tattacgcagactcactgaagggccgaatcaccatctccagagacaacgccaagaactcactgtatctgcaaatgaacagcctgagagtcgaggacacgggtgtctattactgt

SEQ ID NO: 4937 - DNA, 114 bp, synthetic construct
  misc_feature 1..114: note = Synthetic construct
  source 1..114: mol_type = other DNA
tattacgcagactcagtgaagggccgattcaccgtctccagagacaacgccaagaactctctgtatctgcaaatgaacagcctgcgagccgaggacacggctgtgtattactgc

SEQ ID NO: 4938 - DNA, 114 bp, synthetic construct
  misc_feature 1..114: note = Synthetic construct
  source 1..114: mol_type = other DNA
tactacgcagactcagtgaagggccgattcaccatctccagagacaacgccaagaactcactgtatctgcaaatgaacagcctgagacccgaggacacggctgtgtattactgt

SEQ ID NO: 4939 - DNA, 114 bp, synthetic construct
  misc_feature 1..114: note = Synthetic construct
  source 1..114: mol_type = other DNA
tactacgcagactcagtgaagggccgattcaccatctccagagacaacgccaagaactcactgtatctgcaaatgaacagcctgagagccgaggacacggctgtgtattactgt

SEQ ID NO: 4940 - DNA, 114 bp, synthetic construct
  misc_feature 1..114: note = Synthetic construct
  source 1..114: mol_type = other DNA
tattacgcagactcagtgcagggccgattcaccatctccagagacaactccaagaattcactgtatctgcaaatgaacaacctgacagccgaggacacggctgtctattactgt

SEQ ID NO: 4941 - DNA, 114 bp, synthetic construct
  misc_feature 1..114: note = Synthetic construct
  source 1..114: mol_type = other DNA
tactacgcagactctgtgaagggccgattcaccatctccagagacaacgccaagagctcactgtatctgcaaatgaataacctgagagccgaggacacggctgtttattactgt

SEQ ID NO: 4942 - DNA, 114 bp, synthetic construct
  misc_feature 1..114: note = Synthetic construct
  source 1..114: mol_type = other DNA
tactacgcagactctgtgaagggccgattcaccatctccagagacaacgccaagaactcactatatctgcaaatgaacagcctgagagccgaggacacggctgtttattactgt

SEQ ID NO: 4943 - DNA, 114 bp, synthetic construct
  misc_feature 1..114: note = Synthetic construct
  source 1..114: mol_type = other DNA
tactacgcagactctgtggagggccgattcatcgtctccagagacaacgccgagaactcactatatctgcaaatgaacagcctgacagtcgaggacacggctgtttattactgt

SEQ ID NO: 4944 - DNA, 114 bp, synthetic construct
  misc_feature 1..114: note = Synthetic construct
  source 1..114: mol_type = other DNA
tactacgcagactctgtgaagggccgattcaccatctccagagacaacgccaagaactcactgtatctgcaattgaacagcctgagagccgaggacacggctgtctattactgt

SEQ ID NO: 4945 - DNA, 114 bp, synthetic construct
  misc_feature 1..114: note = Synthetic construct
  source 1..114: mol_type = other DNA
tactacgcagactctgtgaagggccgattcaccatctccagagacaacgccaagaactcactgtatctgcaaatgaacagcctgagagccgaggacacggctgtttattattgt

SEQ ID NO: 4946 - DNA, 114 bp, synthetic construct
  misc_feature 1..114: note = Synthetic construct
  source 1..114: mol_type = other DNA
tactacgcaggctctgtgaagggccgattcaccatctccagagacaacgccaagaactccctgtatctgcaaatgaacagcctgagagccgaggacacggctgtttattactgt

SEQ ID NO: 4947 - DNA, 114 bp, synthetic construct
  misc_feature 1..114: note = Synthetic construct
  source 1..114: mol_type = other DNA
tactactcagactctgtgaagggccgattcaccgtctccagagacaacgccaaaaactcactatatctgcaattgaacagcctgagacccgaagacacggctgtttattattgt

SEQ ID NO: 4948 - DNA, 114 bp, synthetic construct
  misc_feature 1..114: note = Synthetic construct
  source 1..114: mol_type = other DNA
tactacgcagactctgtgaagggccgattcaccatctccagagacaacgccaagaactcactgtatctgcaaatgaacagcctgagagccgaggacacggctgtttattactgt

SEQ ID NO: 4949 - DNA, 114 bp, synthetic construct
  misc_feature 1..114: note = Synthetic construct
  source 1..114: mol_type = other DNA
tactacgcagagtctgtgaagggccgattcaccatctccagagacaacgccaagaactcactgtatctgcaaatgaacagcctgagagccgaggacacggctgtttattactgt

SEQ ID NO: 4950 - DNA, 114 bp, synthetic construct
  misc_feature 1..114: note = Synthetic construct
  source 1..114: mol_type = other DNA
tattatgtagattcagtgaagggccgattcaccatctccagagacaacgccaagaactcactgtatctgcaaatgaatagcctgcgagccgaggacacggcagtatattactgt

SEQ ID NO: 4951 - DNA, 114 bp, synthetic construct
  misc_feature 1..114: note = Synthetic construct
  source 1..114: mol_type = other DNA
aactacgcagactctgtgaagggccgattcaccgtctccagagacaacgccaagaactcattgcatctgcaaatgaatagcctgagagccgaggacacggcggtttattattgt

SEQ ID NO: 4952 - DNA, 114 bp, synthetic construct
  misc_feature 1..114: note = Synthetic construct
  source 1..114: mol_type = other DNA
tattacgcagactctgtgaagggccgattcaccatctccagagacaacgccaagaattcagtttttctacagatggacaacctgagagccgaggacacggctgtctattactgt

SEQ ID NO: 4953 - DNA, 114 bp, synthetic construct
  misc_feature 1..114: note = Synthetic construct
  source 1..114: mol_type = other DNA
cactacgcagactctgtgaagggccgattcaccatctccagagacaacgccaagaacgcactgtatctacaaatggagagcctgagagccgacgacacggctgtttatttctgt

SEQ ID NO: 4954 - DNA, 114 bp, synthetic construct
  misc_feature 1..114: note = Synthetic construct
  source 1..114: mol_type = other DNA
tactacgcagactctgtgaagggccggtttatcatttccagagacaaagccaagaattcactgtatctgcaaatgaatagcctgagggtcgaggacacggctgtttattactgt

SEQ ID NO: 4955 - DNA, 114 bp, synthetic construct
  misc_feature 1..114: note = Synthetic construct
  source 1..114: mol_type = other DNA
tcctacgcagactcagtgaagggccgattcaccatctccagagacaacgccaagaactcactatatctccaattgaacagcctgagagtcgaggacacggctctatattactgt

SEQ ID NO: 4956 - DNA, 114 bp, synthetic construct
  misc_feature 1..114: note = Synthetic construct
  source 1..114: mol_type = other DNA
tacatcgcagactcagtgaagggccgattcaccgtctccagagacaacgccaagagcactctgtttctgcagatgaacgacctgagagccgacgacacggcatattattactgt

SEQ ID NO: 4957 - DNA, 114 bp, synthetic construct
  misc_feature 1..114: note = Synthetic construct
  source 1..114: mol_type = other DNA
tattatgtagactcagtgaagggccgattcaccatctccagagacaacgccaagagctcattgtatctgcaaatgaccagcctgagcgccgaggacacggctgtttattactgt

SEQ ID NO: 4958 - DNA, 114 bp, synthetic construct
  misc_feature 1..114: note = Synthetic construct
  source 1..114: mol_type = other DNA
aactacgcacagaagttccagggcagagtcacgattaccgcggacgagtccacgagcacagcctacatggagctgagcagcctgagatctgaggacacggccgtgtattactgt

SEQ ID NO: 4959 - DNA, 114 bp, synthetic construct
  misc_feature 1..114: note = Synthetic construct
  source 1..114: mol_type = other DNA
tactacgcagactctgtgaagggccgattcaccatctccagggacaacgccaagaactcactgtttctgcaaatggacagcctgagagccgaggactcggctgtgtattactgt

SEQ ID NO: 4960 - DNA, 114 bp, synthetic construct
  misc_feature 1..114: note = Synthetic construct
  source 1..114: mol_type = other DNA
aatgtcgcaggctctgtgaggggccgattcaccatgtccagggacaacgccaagaattccctgtatctgcaaatggacagcctgacagtcgaggacacggctgtctactactgt

SEQ ID NO: 4961 - DNA, 114 bp, synthetic construct
  misc_feature 1..114: note = Synthetic construct
  source 1..114: mol_type = other DNA
tcttacgcagactcagtgaagggccgattcaccatctccagagacaacgccaagaactcactgtttctgcaaatgaacagcctgagagccgacgacacggctgtttattactgt

SEQ ID NO: 4962 - DNA, 114 bp, synthetic construct
  misc_feature 1..114: note = Synthetic construct
  source 1..114: mol_type = other DNA
tattcctcagactcagtgaagggccgattcaccatttccagggacaatgccaagagattattgtctttagaaatggaaggtctgagggacgacgactcgggtgtctattactgt

SEQ ID NO: 4963 - DNA, 114 bp, synthetic construct
  misc_feature 1..114: note = Synthetic construct
  source 1..114: mol_type = other DNA
tatgatgcagattctgtgaagggccgattcaccatctccagagacaacgccaagaattcactgtatctgcaaatgaacagcctgagagccgaggacacggctatttattactgt

SEQ ID NO: 4964 - DNA, 114 bp, synthetic construct
  misc_feature 1..114: note = Synthetic construct
  source 1..114: mol_type = other DNA
tactacgcagactctgtgaagggccgattcaccatctccagagacaacgccaacaactcactgtatctgcaaatgaacagcctgagagccgaggacacggctgtttattattgt

SEQ ID NO: 4965 - DNA, 114 bp, synthetic construct
  misc_feature 1..114: note = Synthetic construct
  source 1..114: mol_type = other DNA
tactacgcggactctgtgaagggccgattcaccatatccagagacaacgccaagaattcagtgtttctagaagtgagcagcctgagagccgaagacacggctctgtactactgt

SEQ ID NO: 4966 - DNA, 114 bp, synthetic construct
  misc_feature 1..114: note = Synthetic construct
  source 1..114: mol_type = other DNA
gaccacgctgcacccgtgaaaggcagattcaccatctcaagagatgattcaaaaaacaccctgtttctgcaaatggacagcctgaaaaccgaggacacagccatttattactgt

SEQ ID NO: 4967 - DNA, 114 bp, synthetic construct
  misc_feature 1..114: note = Synthetic construct
  source 1..114: mol_type = other DNA
tactatgcagactctgtgaagggccgattcaccatctccagagacaacgccaagaagtccgtgaccctgcaaatgaatagtctgaaagtggaggatacggctctttacttctgt

SEQ ID NO: 4968 - DNA, 114 bp, synthetic construct
  misc_feature 1..114: note = Synthetic construct
  source 1..114: mol_type = other DNA
tactacctagactcagtgaagggccgattcaccatttccagagacaacgcccagaactcactgcatctgcaaatggacagcctgagagccgaggacacggctgtctattactgt

SEQ ID NO: 4969 - DNA, 114 bp, synthetic construct
  misc_feature 1..114: note = Synthetic construct
  source 1..114: mol_type = other DNA
acgtatgcccagggcttcacaggacggtttgtcttctccttggacacctctgtcagcacggcatatctgcagatcagcagcctaaaggctgaggacactgccgtgtattactgt

SEQ ID NO: 4970 - DNA, 114 bp, synthetic construct
  misc_feature 1..114: note = Synthetic construct
  source 1..114: mol_type = other DNA
acgtatgcccagggcttcacaggacgatttgtcttctccttggacacctctggcagcacggcatatctgcagatcagcagcctaaaggctgaggacactgccatatattactgt

SEQ ID NO: 4971 - DNA, 114 bp, synthetic construct
  misc_feature 1..114: note = Synthetic construct
  source 1..114: mol_type = other DNA
acgtacgcccagggcttcactggacggtttgtcttctccttggacagctctgtcagtacggcatatctgcagatcaccagcctaaaggctgaggacactgccatgtattactgt

SEQ ID NO: 4972 - DNA, 114 bp, synthetic construct
  misc_feature 1..114: note = Synthetic construct
  source 1..114: mol_type = other DNA
atgtatgcccagggcttcacaggacggtttgtcttctccttggacacgtctgtcaacacggcatatttggagatcactagcctgaagactgaggacagtgccgtttattactgt

SEQ ID NO: 4973 - DNA, 114 bp, synthetic construct
  misc_feature 1..114: note = Synthetic construct
  source 1..114: mol_type = other DNA
acttatgcccagggcttcacaggacgctttgtcttctccatggacacctctgtcagcacggcatatctgcagatcagcagcctaagggctgctgatagtgccgtgtattattgt

SEQ ID NO: 4974 - DNA, 114 bp, synthetic construct
  misc_feature 1..114: note = Synthetic construct
  source 1..114: mol_type = other DNA
agttatgcagactctgtgaagggccggttcaccatctccagagacaacgccaagaactccctccatctgcaaatgaacagtctgagagccgaggacacggccttgtattactgt

SEQ ID NO: 4975 - DNA, 114 bp, synthetic construct
  misc_feature 1..114: note = Synthetic construct
  source 1..114: mol_type = other DNA
ggttatgcagactctgtgaagggccgcttcaccatctccagagacaacgccaagaattccgtctttctacaaatgaacagtttgagagccgaggacacggccctctattactgt

SEQ ID NO: 4976 - DNA, 114 bp, synthetic construct
  misc_feature 1..114: note = Synthetic construct
  source 1..114: mol_type = other DNA
gactacgcagactccgtgaagggccggttcaccatctccagagacaattccaagaacacactgtatctgcacatgtacagcctgagagccgaggacacggccctgtattactgt

SEQ ID NO: 4977 - DNA, 114 bp, synthetic construct
  misc_feature 1..114: note = Synthetic construct
  source 1..114: mol_type = other DNA
tattacgcagactccgtgaagggccggttcaccatctccagagacaattccaagaacacactttatctgcaaatgaacagcctgagagccgaggacacggccgtatattactgt

SEQ ID NO: 4978 - DNA, 114 bp, synthetic construct
  misc_feature 1..114: note = Synthetic construct
  source 1..114: mol_type = other DNA
gaatacgccgcgtttgtgaaaggcagattcaccatctcaagagctgattccaaaagcatcgcctatctgcaaatgaacagcctggaaaccgaggacacagccgtgtattactgt

SEQ ID NO: 4979 - DNA, 114 bp, synthetic construct
  misc_feature 1..114: note = Synthetic construct
  source 1..114: mol_type = other DNA
tactacgcagactccgtgaagggccggttcagcatctccagagacaaaaccaagaacaccctatatctgcaaatgaccagcctgagagccgaagacacggccgtatatttctgc

SEQ ID NO: 4980 - DNA, 114 bp, synthetic construct
  misc_feature 1..114: note = Synthetic construct
  source 1..114: mol_type = other DNA
ttttacgcagactccgtgaagggccggttcaccatctccagagacaattccaagaatacgctgtttttgcaaatgaacagcctgagagccgacgacacggccgtatatttctgt

SEQ ID NO: 4981 - DNA, 114 bp, synthetic construct
  misc_feature 1..114: note = Synthetic construct
  source 1..114: mol_type = other DNA
tattatgtggactctatggagggccgattcaccatctccagagacaacaccctgaactcagtgtttctgcaaatgaagagcctgagagccgaggacacggctgtgtattactgt

SEQ ID NO: 4982 - DNA, 114 bp, synthetic construct
  misc_feature 1..114: note = Synthetic construct
  source 1..114: mol_type = other DNA
tactacgcagactccgtgaagggccggttcaccatctccagagacaactccaagaacacgctttatctgcaaatgaacaccctgagagccgaagacacggccgtatattactgt

SEQ ID NO: 4983 - DNA, 114 bp, synthetic construct
  misc_feature 1..114: note = Synthetic construct
  source 1..114: mol_type = other DNA
tactacgcagactttgtgaagggccggctcatcatctccagagacaattccaagagtaggctgtatctgcaaatgagcagcctgagagtcgaggacacggccgtatattactgt

SEQ ID NO: 4984 - DNA, 114 bp, synthetic construct
  misc_feature 1..114: note = Synthetic construct
  source 1..114: mol_type = other DNA
tactacgcagactccgtgaggggccgcttcaccatctccagagacaattccaggaacattctgtatctggaaatgcacaacctgagtctcgacgacacggccacatattactgt

SEQ ID NO: 4985 - DNA, 114 bp, synthetic construct
  misc_feature 1..114: note = Synthetic construct
  source 1..114: mol_type = other DNA
ttctacgcagactccgtgaagggccggttcaccatctccagagacaattccaagaacaccctgtatctggaagtgaacagcctgagagccgacgacgcggccgtttattactgt

SEQ ID NO: 4986 - DNA, 114 bp, synthetic construct
  misc_feature 1..114: note = Synthetic construct
  source 1..114: mol_type = other DNA
tactatgtggactctgtgaagggccgattcaccatctccagagacaacgccaagaactcactgtatctgcaaatgaacagcctgagagccgaggacacggctgtgtattactgt

SEQ ID NO: 4987 - DNA, 114 bp, synthetic construct
  misc_feature 1..114: note = Synthetic construct
  source 1..114: mol_type = other DNA
tcctatgtggactctgtgaggggccgattcaccatctccagagacaacgccaagaactcactgtacctgcaaatgaacagcctgagagccgaggacacggctgtgtattactgt

SEQ ID NO: 4988 - DNA, 114 bp, synthetic construct
  misc_feature 1..114: note = Synthetic construct
  source 1..114: mol_type = other DNA
tactacgcagactctgtgaagggccgattcaccatctccagagacagcgccaagaagtcagtccatctgcaaatgaacagcctgagagtcgaggacacggctctttattactgt

SEQ ID NO: 4989 - DNA, 114 bp, synthetic construct
  misc_feature 1..114: note = Synthetic construct
  source 1..114: mol_type = other DNA
gaatttgccgcgtctgtgaaaggcagattctccatctcaagagaagactcgaaaggcatcgcccatctgcaaatgaacagtctgaaaaccgaggacacagccgtgtacttctgt

SEQ ID NO: 4990 - DNA, 114 bp, synthetic construct
  misc_feature 1..114: note = Synthetic construct
  source 1..114: mol_type = other DNA
ttttacgcagactccgtgaagggccggttctccatctccagagacaattccaagaacactctatttttgcaaatgaacagcctgagagccgacgacacggccatttatttctgt

SEQ ID NO: 4991 - DNA, 114 bp, synthetic construct
  misc_feature 1..114: note = Synthetic construct
  source 1..114: mol_type = other DNA
acctatgtggactccattaggggccgattcttcatctccagagacaacgccaggaactcagtgtacctgcacatgaacagcctgagagtcgacgacacggctatctattactgt

SEQ ID NO: 4992 - DNA, 114 bp, synthetic construct
  misc_feature 1..114: note = Synthetic construct
  source 1..114: mol_type = other DNA
gaatatggcgcgtccgtgaaaggcagattcaccatctcgagagatgatcccaaaagcatcgcctatctgcaaatgaccaccctgaaaaccgacgacacagccgtgtacttctgt

SEQ ID NO: 4993 - DNA, 114 bp, synthetic construct
  misc_feature 1..114: note = Synthetic construct
  source 1..114: mol_type = other DNA
ttttatgcggactctgtgaagggccgattcagcatttcgagaaacaatggttataatactttgactctcgaaatgagaaacctgagagtcgacgacacggctgtctactattgc

SEQ ID NO: 4994 - DNA, 114 bp, synthetic construct
  misc_feature 1..114: note = Synthetic construct
  source 1..114: mol_type = other DNA
tattacgcagactctgtgaagggccgattcaccatctccagggacaacgccaacaattccttgtatctacaaatgaccagcctgagagccgacgacacggctgtctattattgt

SEQ ID NO: 4995 - DNA, 114 bp, synthetic construct
  misc_feature 1..114: note = Synthetic construct
  source 1..114: mol_type = other DNA
tactacgcagactctgtggagggccgattctccatctccagggacaacgccaggaactcactatttttgcaaatgaacagcctgagagtcggagacacggctgtatattactgt

SEQ ID NO: 4996 - DNA, 114 bp, synthetic construct
  misc_feature 1..114: note = Synthetic construct
  source 1..114: mol_type = other DNA
tactacgcggactccgtgaagggccggttcaccatctccagagacaactccaagaatacactatatctgcagatgaacagcctgagagccgaggacacggccctgtattactgt

SEQ ID NO: 4997 - DNA, 114 bp, synthetic construct
  misc_feature 1..114: note = Synthetic construct
  source 1..114: mol_type = other DNA
tactacgcagactccgtgaagggccgcctcaccatctccagagacaataccaagaacacactgtttctgcaaatgaacagcctgagagtcgaggacacggccgtctattattgt

SEQ ID NO: 4998 - DNA, 114 bp, synthetic construct
  misc_feature 1..114: note = Synthetic construct
  source 1..114: mol_type = other DNA
tactacgcagactctgtgaagggccgattcaccatctccagggacaacgccaagaactcactgaatctgcaaatgaatagcctgagagccgaggacacggctgtatattactgt

SEQ ID NO: 4999 - DNA, 114 bp, synthetic construct
  misc_feature 1..114: note = Synthetic construct
  source 1..114: mol_type = other DNA
tactacgcagactctgtgaagggccgattcaccatctccagggacaacgccaagaactcactgtatctgcaaatgaacagcctgagagccgaggacacggctgtgtattactgt

SEQ ID NO: 5000 - DNA, 114 bp, synthetic construct
  misc_feature 1..114: note = Synthetic construct
  source 1..114: mol_type = other DNA
tactacgcagactctgtgaagggccgattcaccatctccagggacaccgccaagaactcactgtatctgcaaatgaacagcctgagagccgaggacacggctgtgtattactgt

SEQ ID NO: 5001 - DNA, 114 bp, synthetic construct
  misc_feature 1..114: note = Synthetic construct
  source 1..114: mol_type = other DNA
agttacgcagactctgtgaagggccgattcaccatctccagggacaacgccaagagctcactgtttctggaaatgaacaccctgagagccgaggacacggctgtgtacaactgt

SEQ ID NO: 5002 - DNA, 114 bp, synthetic construct
  misc_feature 1..114: note = Synthetic construct
  source 1..114: mol_type = other DNA
tactacgcagactctctgttgggccgcttcaccgtctccagggacaacgccaagaactctctgtatctgcaaatgagcagcctgagatccgacgacacggctgtgtattactgt

SEQ ID NO: 5003 - DNA, 114 bp, synthetic construct
  misc_feature 1..114: note = Synthetic construct
  source 1..114: mol_type = other DNA
tactatgcagactctgtgaagggccgattcaccatctccagggacaacgccaacaactcactgtatctgcaaatgaacagtctgagagccgaggacacggctatatattactgt

SEQ ID NO: 5004 - DNA, 114 bp, synthetic construct
  misc_feature 1..114: note = Synthetic construct
  source 1..114: mol_type = other DNA
ggttatgcagactctgtgaaggaccgattcgccatctccagagacaatggcaagaactccctatatctggaattgaacagtctgggggtcgaggacacggccgtctactactgt

SEQ ID NO: 5005 - DNA, 114 bp, synthetic construct
  misc_feature 1..114: note = Synthetic construct
  source 1..114: mol_type = other DNA
ttctacggcggctccgtggggggccgcttcaccatttccagagataattccgaaaacatggtttttctacaaatgaacaacctcagaggcgacgacacggccgtatattactgt

SEQ ID NO: 5006 - DNA, 114 bp, synthetic construct
  misc_feature 1..114: note = Synthetic construct
  source 1..114: mol_type = other DNA
gactacgcagactccgtgaagggtcgattcaccatctccagagacaattccaacaatacgttgtttctgcaaatgaccagcctgagagccgacgacacggccatatattactgc

SEQ ID NO: 5007 - DNA, 114 bp, synthetic construct
  misc_feature 1..114: note = Synthetic construct
  source 1..114: mol_type = other DNA
tacgacgcagactccgtgaagggccgattcaccatctccagagacagttccaagaacactctgtttctgcaaatgaatagcctgataaccgaggacacggccgtatatttctgt

SEQ ID NO: 5008 - DNA, 114 bp, synthetic construct
  misc_feature 1..114: note = Synthetic construct
  source 1..114: mol_type = other DNA
tattacgcagactccgtgaagggcagattcaccatctccagagacaattccaagaatatactgtatcttcaaatgaacagcctgagagccgaggacacggctgtgtatttctgt

SEQ ID NO: 5009 - DNA, 114 bp, synthetic construct
  misc_feature 1..114: note = Synthetic construct
  source 1..114: mol_type = other DNA
gaattcggcgcacccgtgaaaggcaggttcaccatctcaagagatgattcaaaaaacacggtgtatctacagatgaacagcctgaaaaccgaggacacagccgtgtattactgt

SEQ ID NO: 5010 - DNA, 114 bp, synthetic construct
  misc_feature 1..114: note = Synthetic construct
  source 1..114: mol_type = other DNA
gaatacgccgcgtctgtgaaaggcagattcaccatctcaagagatgtatccagaagcatcgcctatctgcaaatgaacagcctgaaaaccgaagacacagccctttattactgt

SEQ ID NO: 5011 - DNA, 114 bp, synthetic construct
  misc_feature 1..114: note = Synthetic construct
  source 1..114: mol_type = other DNA
gaatacgccgcgtctgtgaaaggcagattcaccatctcaagagatgattccaaaagcatcgcctatctgcaaatgaacagcctgaaaaccgaggacacagccgtgtattactgt

SEQ ID NO: 5012 - DNA, 114 bp, synthetic construct
  misc_feature 1..114: note = Synthetic construct
  source 1..114: mol_type = other DNA
ttctatggagactccgtgaagggccgattcaccatctccagacacaattccaacaacacggtgtttcttcaaatgaatagcctgagacctgaggacacggccgtctattactgt

SEQ ID NO: 5013 - DNA, 114 bp, synthetic construct
  misc_feature 1..114: note = Synthetic construct
  source 1..114: mol_type = other DNA
tattatgcagactccgttaacggccgattcaccatctccagacacaattccaagaacacgctgtatcttcaaatgaacagcctgagagcggaggacacggccgtttattactgt

SEQ ID NO: 5014 - DNA, 114 bp, synthetic construct
  misc_feature 1..114: note = Synthetic construct
  source 1..114: mol_type = other DNA
tactacgcagactccgtgaagggccggttcaccatctccagagacaattccaagaacacggtgtatctgcaaatgaacagcctgagagacgaggacacggccgtatattactgt

SEQ ID NO: 5015 - DNA, 114 bp, synthetic construct
  misc_feature 1..114: note = Synthetic construct
  source 1..114: mol_type = other DNA
tactacgcagactccgtgaagggccggttcaccatctccagagacaattccaagaacacgctgtttttgcaaatgaacagcctgagagccgaggacacggccgtatattactgt

SEQ ID NO: 5016 - DNA, 114 bp, synthetic construct
  misc_feature 1..114: note = Synthetic construct
  source 1..114: mol_type = other DNA
tatcacgcagactccgtgaagggccggttcaccatctccagagacaattccaagaacactctgtatctgcaaatgagcagcctgagagccgaggacacggccgtatattactgt

SEQ ID NO: 5017 - DNA, 114 bp, synthetic construct
  misc_feature 1..114: note = Synthetic construct
  source 1..114: mol_type = other DNA
gagtacgcagactccgtgaagggccggttcaccatctccagagacaactccaagaacacactgtatctgcaaatgaacagcctgagagccgaggacacggccatatattactgt

SEQ ID NO: 5018 - DNA, 114 bp, synthetic construct
  misc_feature 1..114: note = Synthetic construct
  source 1..114: mol_type = other DNA
tactacgcagactccgtgaagggccggttcaccatctccagagacaattccaagaacacgctgtatctgcaaatgaacagcctgagagccgaggacacggccgtatattactgt

SEQ ID NO: 5019 - DNA, 114 bp, synthetic construct
  misc_feature 1..114: note = Synthetic construct
  source 1..114: mol_type = other DNA
tactacgcagactccgtgaagggccggttcaccatctccagagacaattccaagaacacgctgtatctgcaaatgaacagcctgagagccgaggacacggccgtcttttactgt

SEQ ID NO: 5020 - DNA, 114 bp, synthetic construct
  misc_feature 1..114: note = Synthetic construct
  source 1..114: mol_type = other DNA
tattacgcagactccgtgaagggccggttcaccatttccagagagtattccaagaacagcctgtatctgcaaatgcacagcctcagagccgaagacacggccgtttattactgt

SEQ ID NO: 5021 - DNA, 114 bp, synthetic construct
  misc_feature 1..114: note = Synthetic construct
  source 1..114: mol_type = other DNA
tactacgcagactccgcgaggggccggttcaccatctccagagacaattccaagaacacagtgtatctgcacatgaacagcctgagagccgaggacacggccgcatattactgt

SEQ ID NO: 5022 - DNA, 114 bp, synthetic construct
  misc_feature 1..114: note = Synthetic construct
  source 1..114: mol_type = other DNA
tactacgcagactccgtgaagggccggttcaccatctccagagacaattccaagaacacgctgtatctgcaaatgaacagcctgagagccgaggacacggccatatattactgt

SEQ ID NO: 5023 - DNA, 114 bp, synthetic construct
  misc_feature 1..114: note = Synthetic construct
  source 1..114: mol_type = other DNA
tcctatacagactccgtgaagggccggttcatcatctccagagacaatttgaagaacacgctgtttctgcaaatgaacagcctgagagtcgaggatacggccgtatactactgt

SEQ ID NO: 5024 - DNA, 114 bp, synthetic construct
  misc_feature 1..114: note = Synthetic construct
  source 1..114: mol_type = other DNA
tactacgcagactccgtgaagggccgattcaccatctccagagacaattccaagaacacgctgtatcttcaaatgaacagcctgagagccgaggacacggccgtgtattactgt

SEQ ID NO: 5025 - DNA, 114 bp, synthetic construct
  misc_feature 1..114: note = Synthetic construct
  source 1..114: mol_type = other DNA
tactacgcagactccgtgaagggccgattcaccatctccagagacagttccaagaacacgctgtatcttcaaatgaacagcctgagagccgaggacacggccgtgtattactgt

SEQ ID NO: 5026 - DNA, 114 bp, synthetic construct; identical to SEQ ID NO: 1789
  misc_feature 1..114: note = Synthetic construct
  source 1..114: mol_type = other DNA

SEQ ID NO: 5027 - DNA, 114 bp, synthetic construct
  misc_feature 1..114: note = Synthetic construct
  source 1..114: mol_type = other DNA
tactatgtggactctgtgaagggccgattcaccatctccagagacaacgccaagaactcactgtatctgcaaatgaacagcctgagagccgaggacacggctgtgtatttctgt

SEQ ID NO: 5028 - DNA, 114 bp, synthetic construct
  misc_feature 1..114: note = Synthetic construct
  source 1..114: mol_type = other DNA
tacttggtggactctgtgaagggccgattcaccatctccagagacaacgccaagaactcactgtatctgcaaatgaacagcctgagagccgaggacacggctgtgtattactgt

SEQ ID NO: 5029 - DNA, 114 bp, synthetic construct
  misc_feature 1..114: note = Synthetic construct
  source 1..114: mol_type = other DNA
ttctatgtggactctgtgaagggccgattcaccatctccagagacaacgccaagaaatcactgtatctgcaaatgaacagcctgagagccgaggacacggctgtgtattattgt

SEQ ID NO: 5030 - DNA, 114 bp, synthetic construct
  misc_feature 1..114: note = Synthetic construct
  source 1..114: mol_type = other DNA
gcatatgtggactcgctgaagggccgattcatcatctccagagacaacgcccagaactcactgtttctgcaaatgaacagcctgacagtcgaggacacggctgtctattactgt

SEQ ID NO: 5031 - DNA, 114 bp, synthetic construct
  misc_feature 1..114: note = Synthetic construct
  source 1..114: mol_type = other DNA
gactacgctgcacccgtgaaaggcagattcaccatctcaagagatgattcaaaaaacacgctgtatctgcaaatgaacagcctgaaaaccgaggacacagccgtgtattactgt

SEQ ID NO: 5032 - DNA, 114 bp, synthetic construct
  misc_feature 1..114: note = Synthetic construct
  source 1..114: mol_type = other DNA
gactacgctgcacccgtgaacggcagattcatcatctcaagagaagattcaaaaaacacactgtatctgcaaatgaacagcctgaaaaccgaggacacagccgtgtattactgt

SEQ ID NO: 5033 - DNA, 114 bp, synthetic construct
  misc_feature 1..114: note = Synthetic construct
  source 1..114: mol_type = other DNA
gactacgctgcacccgtgaaaggcagattcaccatctcaagagatgattcaaaaaactcgctgtatctgcaaatgaacagcctgaaaaccgaggactcagccgtgtattactgt

SEQ ID NO: 5034 - DNA, 114 bp, synthetic construct
  misc_feature 1..114: note = Synthetic construct
  source 1..114: mol_type = other DNA
gaatacgccgcgtctgtgagaggcagattcaccatctcaagagatgatggcaaaagcatcgcctatctgcaaatgaacaacctgcgaaccgaggacacagccgtgtattactgt

SEQ ID NO: 5035 - DNA, 114 bp, synthetic construct
  misc_feature 1..114: note = Synthetic construct
  source 1..114: mol_type = other DNA
tactacgcagactccgtgaagggccggttcaccatctccagagacaattccaagtacacgctgtatctacaaatgaacagcctgagagccgaggacacggccgtatattactgt

SEQ ID NO: 5036 - DNA, 114 bp, synthetic construct
  misc_feature 1..114: note = Synthetic construct
  source 1..114: mol_type = other DNA
tactatgtggactctgtgaagggccgattcaccatctccagagacaacgccaagaactcactgtatctgcaaattaacagcctgagagccgaggacacggctgtgtattcctgt

SEQ ID NO: 5037 - DNA, 114 bp, synthetic construct
  misc_feature 1..114: note = Synthetic construct
  source 1..114: mol_type = other DNA
atctatgtggactctgtgaagggccggttcaccatctccagagacaacgccaagaactctctgtttctgcaaatggacagcctgagaggcgaagacactggtctttattactgt

SEQ ID NO: 5038 - DNA, 114 bp, synthetic construct
  misc_feature 1..114: note = Synthetic construct
  source 1..114: mol_type = other DNA
tactacgcagagtccgtgaagggccgattcaccatctctcgagacaattccaagaacactttgtatcttcaaatgaacagcctgagagtcgacgacacggccgtctattactgt

SEQ ID NO: 5039 - DNA, 114 bp, synthetic construct
  misc_feature 1..114: note = Synthetic construct
  source 1..114: mol_type = other DNA
aattatgtggactctgtgaagggccgattcaccatctccagagacaacgcccagaattcagtgtttctgcaaatgaggcgcctgagagtcgaggacacggctgtctactattgt

SEQ ID NO: 5040 - DNA, 114 bp, synthetic construct
  misc_feature 1..114: note = Synthetic construct
  source 1..114: mol_type = other DNA
tactacgcagactctgtgaggggccgattcaccgtgtccagggaccaggccaaaaactcactgtttttgcaaatgaacagtctgagagtcgaggacacggctgtatattactgt

SEQ ID NO: 5041 - DNA, 114 bp, synthetic construct
  misc_feature 1..114: note = Synthetic construct
  source 1..114: mol_type = other DNA
acttatgcagactctgtgaagggccgattcaccatcgccagggacaacgccaggaactccctctacctgcaaatgaatggtctgggacccgacgacacggccctttatttctgt

SEQ ID NO: 5042 - DNA, 114 bp, synthetic construct
  misc_feature 1..114: note = Synthetic construct
  source 1..114: mol_type = other DNA
tacgggttgggctctgtggggggccgattcaccatctccagagacaacgccaagaactcactgtatctccaaatgaacagcctgagagccgaggacacggctgtgtattactgt

SEQ ID NO: 5043 - DNA, 114 bp, synthetic construct
  misc_feature 1..114: note = Synthetic construct
  source 1..114: mol_type = other DNA
tcctacgcagagtctgtgaagggccgattcaccgtctccagagacaacgccaggaactcactgtatctgcacatgaatagcctgagagccgaggacacgggtgtttattattgt

SEQ ID NO: 5044 - DNA, 114 bp, synthetic construct
  misc_feature 1..114: note = Synthetic construct
  source 1..114: mol_type = other DNA
gaatacgccgcgtctctgaaaggcagattcaccatctcaagagatgattccagaagcatcgcctatctgcaaatgaacagcctgaaaatcgaggacacagccgtgtattactgt

SEQ ID NO: 5045 - DNA, 114 bp, synthetic construct
  misc_feature 1..114: note = Synthetic construct
  source 1..114: mol_type = other DNA
ctctactcagactccgtgaagggccggttcaccatctccagagacaattccaaaaacacactgtatctgcaaatcaacagcctgagagccgaagacacggccatatatcactgt

SEQ ID NO: 5046 - DNA, 114 bp, synthetic construct
  misc_feature 1..114: note = Synthetic construct
  source 1..114: mol_type = other DNA
tactacgcagactccgtgaagggccgtttcaccatctccagagacaattccaagaacacggtgtatctggaaatgaacagcctgaaagccgaggacacggccgtatattactgt

SEQ ID NO: 5047 - DNA, 114 bp, synthetic construct
  misc_feature 1..114: note = Synthetic construct
  source 1..114: mol_type = other DNA
aactatgtggactctgtgaagggccgattcatcatctccagagacaatgccaagaactcagtgtatctgcaaatgaacagcctgagagtcgaggacacggctatctattattgt

SEQ ID NO: 5048 - DNA, 114 bp, synthetic construct
  misc_feature 1..114: note = Synthetic construct
  source 1..114: mol_type = other DNA
aattatgtggcctctgtggagggcagattcaccatctccagagacgacagcaagaggtctgtagatttgcagatggacaggctgacagccgaagacacggccatctatttctgt

SEQ ID NO: 5049 - DNA, 114 bp, synthetic construct
  misc_feature 1..114: note = Synthetic construct
  source 1..114: mol_type = other DNA
cattatgtcgactctgtgaagggtcgattcaccatctccagagacaacaccaacagttcattgtttctgcaaatgagtaggctgagagtcgaggacacggctgtttattactgc

SEQ ID NO: 5050 - DNA, 114 bp, synthetic construct
  misc_feature 1..114: note = Synthetic construct
  source 1..114: mol_type = other DNA
gactacgccgcacccgtgagaggcagattcaccatttcaagacatgattcattagacacactgtctctacaaatgaacaacgtgacagccgacgacgcagccgtctattactgt

SEQ ID NO: 5051 - DNA, 114 bp, synthetic construct
  misc_feature 1..114: note = Synthetic construct
  source 1..114: mol_type = other DNA
tattatacagactccgtgaagggccgcttcaccatctccagagacagctccaagaacatccttcatctccaattggacagtctgaaagtcgaggactcggccctttattattgt

SEQ ID NO: 5052 - DNA, 114 bp, synthetic construct
  misc_feature 1..114: note = Synthetic construct
  source 1..114: mol_type = other DNA
aagtatgcacagaagttccagggcagagtcacgatcaccacggacgaatccacaaggacagtctacatggaactgagtagcctgacatctgacgacacggccgtttattattgt

SEQ ID NO: 5053 - DNA, 114 bp, synthetic construct
  misc_feature 1..114: note = Synthetic construct
  source 1..114: mol_type = other DNA
tactacgcagactccgtgaagggccgattcaccgtctccagggacaacgccaagaagtcactgtatctgcaaatgaacagcctgagagccgaggacacggctgtgtattactgt

SEQ ID NO: 5054 - DNA, 114 bp, synthetic construct
  misc_feature 1..114: note = Synthetic construct
  source 1..114: mol_type = other DNA
tactatgcagactccgtgaagggccggttcaccatctccagagacaattccaagaacacggtgtatctacaaatgaatagcctgagagtcgaggacacggccgtatattattgt

SEQ ID NO: 5055 - DNA, 114 bp, synthetic construct
  misc_feature 1..114: note = Synthetic construct
  source 1..114: mol_type = other DNA
tactatgcagactccgtgaagggccggttcaccatctccagagacaattccaagaacatggtgtatctacaaatgaatagcctgagagtcgaggacacggccgtatattattgt

SEQ ID NO: 5056 - DNA, 114 bp, synthetic construct
  misc_feature 1..114: note = Synthetic construct
  source 1..114: mol_type = other DNA
tactatgctgactctctgaggggccgattcaccatctccagagacaactccaagaatttactctctctacaaatgaacagcctgcgagccgaggacacggctctttatttctgc

SEQ ID NO: 5057 - DNA, 114 bp, synthetic construct
  misc_feature 1..114: note = Synthetic construct
  source 1..114: mol_type = other DNA
gtttatgcagaccttttgtatggcagagtcaccatgaccgcggacgcgtcgacagacacagcctacctggagctgagcggcctgacatctgaagacacggccctttatttctgt

SEQ ID NO: 5058 - DNA, 114 bp, synthetic construct
  misc_feature 1..114: note = Synthetic construct
  source 1..114: mol_type = other DNA
tattatgcagactctgtgaagggccgactcaccatttccagagacaactccaagaaaacagtctttttgcaaatgaatagcctgagaaatgaggacacaggtatatattattgt

SEQ ID NO: 5059 - DNA, 114 bp, synthetic construct
  misc_feature 1..114: note = Synthetic construct
  source 1..114: mol_type = other DNA
cgctacgcggactccgtgaagggccgattcaccatctccagagacaacgccaagaacacactgtatctgcaaatgaacagtctgagagccgaggacacggctgtatattactgt

SEQ ID NO: 5060 - DNA, 114 bp, synthetic construct
  misc_feature 1..114: note = Synthetic construct
  source 1..114: mol_type = other DNA
aactacgcagactcagtgaagggccgattcagcacctccagagacaacgccaagaactccctatatctgcaaatgagtagcctgagagtcgaagacacggctgtctattactgt

SEQ ID NO: 5061 - DNA, 114 bp, synthetic construct
  misc_feature 1..114: note = Synthetic construct
  source 1..114: mol_type = other DNA
tattatgcagactccgtgaagggcagattcaccatctccagagacaacgccaggaacacggtgtatcttcagatgggcagcctgagacctgaggacacggctttatattactgt

SEQ ID NO: 5062 - DNA, 114 bp, synthetic construct
  misc_feature 1..114: note = Synthetic construct
  source 1..114: mol_type = other DNA
tactacgcagactccgtgaagggccgagttaccatctccagagacaattccgaggacaccctatatctccacatgaatagcctgagaatccaggacacggctgtttatcactgt

SEQ ID NO: 5063 - DNA, 114 bp, synthetic construct
  misc_feature 1..114: note = Synthetic construct
  source 1..114: mol_type = other DNA
tactttgcagactccgtgaagggccgatgcaccatctccagagacaattccaagaacacgctgtatctgcaaatgaacagcctgagagctgaggacacggctgtgtattactgt

SEQ ID NO: 5064 - DNA, 114 bp, synthetic construct
  misc_feature 1..114: note = Synthetic construct
  source 1..114: mol_type = other DNA
aggtatgcagactccgtgaagggccgattcaccgtctccagagacaattccaagaacacgctgtttctgcaaatggacagcctgagaccggaggacacggctgtgtacttctgt

SEQ ID NO: 5065 - DNA, 114 bp, synthetic construct
  misc_feature 1..114: note = Synthetic construct
  source 1..114: mol_type = other DNA
tattacgcagactccgtgaggggccgattcaccatctccagagacaactccaagaacacattatttctgcaaatgatcaggctgagacttgaggacacctctgtttattattgt

SEQ ID NO: 5066 - DNA, 114 bp, synthetic construct
  misc_feature 1..114: note = Synthetic construct
  source 1..114: mol_type = other DNA
tactacgcagactccgtgaggggccgattcatcatttccagagacaattccaagaacacgctgtatctgcaaatgaacagcctgaaacctgaggacacggctgtgtattactgt

SEQ ID NO: 5067 - DNA, 114 bp, synthetic construct
  misc_feature 1..114: note = Synthetic construct
  source 1..114: mol_type = other DNA
tattacgcagactccgtgaagggccgattcaccatctccagagacaattccaagaacacgctgtatttgcaaatgaacagcctgagacctgacgacacggctgtgtattactgt

SEQ ID NO: 5068 - DNA, 114 bp, synthetic construct
  misc_feature 1..114: note = Synthetic construct
  source 1..114: mol_type = other DNA
tactacgcagactccgtgaagggccgattcaccatctccagagacgattccaagaacaccctgtatctgcaaatgaacagcctgagaactgaggacacggctgtgtattactgt

SEQ ID NO: 5069 - DNA, 114 bp, synthetic construct
  misc_feature 1..114: note = Synthetic construct
  source 1..114: mol_type = other DNA
cagtatggagagaccgttaagggccgattcaccatctccagagacaatcccaagaacacactatatctgcaaatgaacagcctgagagtcgacgacacggctgtatattattgt

SEQ ID NO: 5070 - DNA, 114 bp, synthetic construct
  misc_feature 1..114: note = Synthetic construct
  source 1..114: mol_type = other DNA
cgctacgcagactccgtgaagggccgattcaccatctccagagacaactccaagaacacgctgtctctgcagatgaacagcctgagagctgacgactcggctgtatatttctgt

SEQ ID NO: 5071 - DNA, 114 bp, synthetic construct
  misc_feature 1..114: note = Synthetic construct
  source 1..114: mol_type = other DNA
ttctacgcagactccgtgaagggccgattcatcatctccagagacaactccaagaacacgctgtatctggaaatgaacagcctgagagctgaggacacggctgtgtattactgt

SEQ ID NO: 5072 - DNA, 114 bp, synthetic construct
  misc_feature 1..114: note = Synthetic construct
  source 1..114: mol_type = other DNA
tactatgcagactccgtgaagggccgattcaccatctccagagacaattccaagaacacgctgtatctgcaaatgaatagcctgagagctgaggacacggctgtgtatttctgt

SEQ ID NO: 5073 - DNA, 114 bp, synthetic construct
  misc_feature 1..114: note = Synthetic construct
  source 1..114: mol_type = other DNA
tactacggagactccgtggagggccgattcaccatctccagagacaattccaagaatatgttgtatctgcaaatgaacagcctgagagctgaggacacggctgtgtatttctgt

SEQ ID NO: 5074 - DNA, 114 bp, synthetic construct
  misc_feature 1..114: note = Synthetic construct
  source 1..114: mol_type = other DNA
tattacgcagactccgtgaagggccgattcaccatctccagagacaattccaagagcacactgtatctgcaaatgaacagcctgagaactgaagacacggctatatattactgt

SEQ ID NO: 5075 - DNA, 114 bp, synthetic construct
  misc_feature 1..114: note = Synthetic construct
  source 1..114: mol_type = other DNA
tactatacagactccgtgaagggccgattcaccatctccagagacaattccaagaacacgctgtatctacaaatgaacagcctgagaactgcggacacggccgtgtattactgt

SEQ ID NO: 5076 - DNA, 114 bp, synthetic construct
  misc_feature 1..114: note = Synthetic construct
  source 1..114: mol_type = other DNA
tactatgcagactccgtgaggggccgattcagcatctccagagacaattccaaaaacacactgtatctccaaatgaacagcctgagagctgaggacacggctgtatattactgt

SEQ ID NO: 5077 - DNA, 114 bp, synthetic construct
  misc_feature 1..114: note = Synthetic construct
  source 1..114: mol_type = other DNA
tactacgcagactccgtgaagggccgattcaccatctccagagacaattccaagaacacactatatatgcaaatgaacagcctgagagctgaggacacggctgtctattactgt

SEQ ID NO: 5078 - DNA, 114 bp, synthetic construct
  misc_feature 1..114: note = Synthetic construct
  source 1..114: mol_type = other DNA
tactacgcagaatccgtgaagggccgattcaccatctccagagacaattccaagaacactctctatctgcaaatgaacagcgtgaggcctgacgacacggctgtgtattactgt

SEQ ID NO: 5079 - DNA, 114 bp, synthetic construct
  misc_feature 1..114: note = Synthetic construct
  source 1..114: mol_type = other DNA
tactacgcagactccgtgaagggccgattcaccatctccagagacaattccaagaacacgctgtatctgcaaatgaacagcctgagagctgaggacacggctgtgtattactat

SEQ ID NO: 5080 - DNA, 114 bp, synthetic construct
  misc_feature 1..114: note = Synthetic construct
  source 1..114: mol_type = other DNA
tactatgcagactccgtgaagggccgattcaccatctccagagacaattccaagaacacactgtatctgcaaatgaacagcctgagagctgaggacacggctgtgtattactgt

SEQ ID NO: 5081 - DNA, 114 bp, synthetic construct
  misc_feature 1..114: note = Synthetic construct
  source 1..114: mol_type = other DNA
tactatgcagactccgtgaagggccgattcaccatttccagagacaattccaagaacacgctgtatctgcaaatgaacagcctgagagctgaggacacggctgtgtattactgt

SEQ ID NO: 5082 - DNA, 114 bp, synthetic construct
  misc_feature 1..114: note = Synthetic construct
  source 1..114: mol_type = other DNA
tactatgcagactccgtgaagggccgattcaccatctccagagacaattccaagaacacgctgtatctgcaaatgaacagcctgagagctgaggacacggctgtgtattactgt

SEQ ID NO: 5083 - DNA, 114 bp, synthetic construct
  misc_feature 1..114: note = Synthetic construct
  source 1..114: mol_type = other DNA
tactacgcagactccgtgaagggccgattcaccatctccagagacacttccaacaacacgctgtatctgcaaatgaacagcctgagagctgaggacacggctgtgtattactgt

SEQ ID NO: 5084 - DNA, 114 bp, synthetic construct
  misc_feature 1..114: note = Synthetic construct
  source 1..114: mol_type = other DNA
tactacgcagactccgtgaagggccgattcaccatctccagagacaattccaagaacacgctgtatctgcaaatgaacagcctgagagctgaggacacggctgtgtattactgt

SEQ ID NO: 5085 - DNA, 114 bp, synthetic construct
  misc_feature 1..114: note = Synthetic construct
  source 1..114: mol_type = other DNA
tattatgcagactccgtgaagggccgattcaccatctccagagacaattccaagaacacgctgtatctgcaaatgaacagcctgagagctgaggacacggctgtgtataactgt

SEQ ID NO: 5086 - DNA, 114 bp, synthetic construct
  misc_feature 1..114: note = Synthetic construct
  source 1..114: mol_type = other DNA
tactatgcagactccgtgaagggccgattcaccatctccagagacaattccaagaacacgctgtatctgcaaatgaacagcctgagagccgaggacacggctgtgtattactgt

SEQ ID NO: 5087 - DNA, 114 bp, synthetic construct
  misc_feature 1..114: note = Synthetic construct
  source 1..114: mol_type = other DNA
aactacagagactccgtgaagggccgcttcaccgtttccagagacaattctaaggaaatgttgtttttacagatggattctatcagagccgacgacacggctatatattattgt

SEQ ID NO: 5088 - DNA, 114 bp, synthetic construct
  misc_feature 1..114: note = Synthetic construct
  source 1..114: mol_type = other DNA
tactacgcagactccgtgaagggccgattcaccatctccagagacaactccaagaacacgctgtatctgcagatgaacagcctgagagctgaggacacggctgtcttttactgt

SEQ ID NO: 5089 - DNA, 114 bp, synthetic construct
  misc_feature 1..114: note = Synthetic construct
  source 1..114: mol_type = other DNA
cattatgcagactccgttaagggccgattcaccatctccagagacaattccgagaacacggtgtatctgcaaatgaacagcctgagagctgaggacacgggtgtatatttctgt

SEQ ID NO: 5090 - DNA, 114 bp, synthetic construct
  misc_feature 1..114: note = Synthetic construct
  source 1..114: mol_type = other DNA
ttctatgcagactccgttaagggccgattcaccatctccagagacaattccaagaccacaatatatctacaaatcaacagcctgagtgccgaggacacggctatgttttactgt

SEQ ID NO: 5091 - DNA, 114 bp, synthetic construct
  misc_feature 1..114: note = Synthetic construct
  source 1..114: mol_type = other DNA
tactacgcagactccgtgaagggtcgatttacaatctctagagacaatttcaagaacacggtgtttctggaaatgaacaacctgagacctgaggaccaggctgtctattattgt

SEQ ID NO: 5092 - DNA, 114 bp, synthetic construct
  misc_feature 1..114: note = Synthetic construct
  source 1..114: mol_type = other DNA
aactatgcagactccgtgaagggccgattcaccatctccagagacatttccgggaatacactgtatctgcaaatgaacagtctgagagttgaggacacggctgtttattactgt

SEQ ID NO: 5093 - DNA, 114 bp, synthetic construct
  misc_feature 1..114: note = Synthetic construct
  source 1..114: mol_type = other DNA
tactacgcagattccgtgaagggccgattcaccatatccagagacaactctaaaaatacgatgtctctgcaaatgaacagtctgagaagtgaagatacggctttgtatttttgt

SEQ ID NO: 5094 - DNA, 114 bp, synthetic construct
  misc_feature 1..114: note = Synthetic construct
  source 1..114: mol_type = other DNA
tactacgcagactccgtgaagggccgattcaccatctccagagacaattccaagaacacgttgtatctgcaaatgaacaacctgagagctgaggacacggctgtatattattgt

SEQ ID NO: 5095 - DNA, 114 bp, synthetic construct
  misc_feature 1..114: note = Synthetic construct
  source 1..114: mol_type = other DNA
tcctttgcagactccgtgatggggcgatgcatcatctctagagacaattccgagaacaccctttttctgcaaatgcacagtctgagagttgaagatacggctctgtattactgc

SEQ ID NO: 5096 - DNA, 114 bp, synthetic construct
  misc_feature 1..114: note = Synthetic construct
  source 1..114: mol_type = other DNA
cgttctgcagactccgtgaagggccgattcaccatttccagagacaattccaagaacacgctgtatctgcaaatgaacaacctgagacctgaagacacggctgtctattattgt

SEQ ID NO: 5097 - DNA, 114 bp, synthetic construct
  misc_feature 1..114: note = Synthetic construct
  source 1..114: mol_type = other DNA
gcatatgctgcgtcggtgaaaggcaggttcaccatctccagagatgattcaaagaacacggcgtatctgcaaatgaacagcctgaaaaccgaggacacggccgtgtattactgt

SEQ ID NO: 5098 - DNA, 114 bp, synthetic construct
  misc_feature 1..114: note = Synthetic construct
  source 1..114: mol_type = other DNA
ggctatgcggactctgtgaagggccgattcatcatctccagagacaacgccaagaactccctatatctgcaaatgaacagtctgagagctgaggacatggccgtgtattactgt

SEQ ID NO: 5099 - DNA, 114 bp, synthetic construct
  misc_feature 1..114: note = Synthetic construct
  source 1..114: mol_type = other DNA
ggctatgcggactctgtgaagggccgcttcaccatctccagagacaacaccaagaactccctgtatctggaaatgaacagtctcagagttgaggacacggccttgtattactgt

SEQ ID NO: 5100 - DNA, 114 bp, synthetic construct
  misc_feature 1..114: note = Synthetic construct
  source 1..114: mol_type = other DNA
gcctatgcggactctgtgaagggccgattcaccatctccagagaaaacgccaggaactccctgtatctgcaaatggacagtctgcgacctgaggacatggccttgtactactgt

SEQ ID NO: 5101 - DNA, 114 bp, synthetic construct
  misc_feature 1..114: note = Synthetic construct
  source 1..114: mol_type = other DNA
ggctatgcggactctgtgaacggccgattcaccatctccagagacaacgccaagaactccctgtatctgcaaatgaacagtctgagagctgaggacatggccttgtattactgt

SEQ ID NO: 5102 - DNA, 114 bp, synthetic construct
  misc_feature 1..114: note = Synthetic construct
  source 1..114: mol_type = other DNA
gcctatgcggactctgtgaagggccgattcaccatctccagagacagcgccaagaactccctgtctctgcaaatgaacagtctgagagctgaggacatggccttgtattactgt

SEQ ID NO: 5103 - DNA, 114 bp, synthetic construct
  misc_feature 1..114: note = Synthetic construct
  source 1..114: mol_type = other DNA
gcctatgcggactctgtggagggccgattcaccatctccagagacaacgccaagaactccctgtatctgcaaatgaacagtctgagagctgaggacatggccttgtattactgt

SEQ ID NO: 5104 - DNA, 114 bp, synthetic construct
  misc_feature 1..114: note = Synthetic construct
  source 1..114: mol_type = other DNA
aactatgcagactctgtgaagggtcgattcaccatctccagagacaacagcaaaaacttcctgtatctgcaaatgaacagtctgagagctgaggacagcgccttgtattattgt

SEQ ID NO: 5105 - DNA, 114 bp, synthetic construct
  misc_feature 1..114: note = Synthetic construct
  source 1..114: mol_type = other DNA
tcctatgcagactctgtgaagggtcggttcaccatctccagagacaactccaaaaactccctctttctgcaaatgaacagtctgagagctgaggacaccgccctgtattattgt

SEQ ID NO: 5106 - DNA, 114 bp, synthetic construct
  misc_feature 1..114: note = Synthetic construct
  source 1..114: mol_type = other DNA
ttctatggagactctgcgcagggtcgcttcagcgtctccagagacaacgacaaaaagttcctgtatctgcacatgaagagtctgagagctgaagacaccgccttcttttactgt

SEQ ID NO: 5107 - DNA, 114 bp, synthetic construct
  misc_feature 1..114: note = Synthetic construct
  source 1..114: mol_type = other DNA
atatatgcagagaagttccagggcagagtcaccataaccgcagacacgtctacagacacagcctacatggagctgagcagcctgagatctgaggacacggccgtgtattactgt

SEQ ID NO: 5108 - DNA, 114 bp, synthetic construct
  misc_feature 1..114: note = Synthetic construct
  source 1..114: mol_type = other DNA
aaatatgcagacaggtttcggggcagagtcaccatgaccgcagacacgtctacaaatacagcctacatggagttgagcagcctgagattggaagacacggccgtctattactgt

SEQ ID NO: 5109 - DNA, 114 bp, synthetic construct
  misc_feature 1..114: note = Synthetic construct
  source 1..114: mol_type = other DNA
atttatgcagaaaagttctatggcagcgtcaccatgaccgccgacacgtctacacaaacaacatttttggagttgagcagtctgaagtttgcggacacggccgtttattactgt

SEQ ID NO: 5110 - DNA, 114 bp, synthetic construct
  misc_feature 1..114: note = Synthetic construct
  source 1..114: mol_type = other DNA
tactacgcacagaagttccagggcagagtcaccatgaccagggacacgtccacgagcacagactatatggagatgagaagcctgagatctgaggacacggccgtgtattactgt

SEQ ID NO: 5111 - DNA, 114 bp, synthetic construct
  misc_feature 1..114: note = Synthetic construct
  source 1..114: mol_type = other DNA
atctacgcacagaagctccaggacagagtctccctgaccagggacacgtccacgagcacaatgtacatggtactcaacagcctgagatctgaagacacggccgtctattattgt

SEQ ID NO: 5112 - DNA, 114 bp, synthetic construct
  misc_feature 1..114: note = Synthetic construct
  source 1..114: mol_type = other DNA
agttacgcacacaggttccggggccgagtcaccatgaccagtgacacgtccacgagcacagtttacctggagctgaccagcctgacacctgaggacacggccgtgtattactgt

SEQ ID NO: 5113 - DNA, 114 bp, synthetic construct
  misc_feature 1..114: note = Synthetic construct
  source 1..114: mol_type = other DNA
agctacgcacagaagttccagggcagagtcaccatgaccagggacacgtccacgagcacagtctacatggagctgagcagcctgagatctgaggacacggccgtgtattactgt

SEQ ID NO: 5114 - DNA, 114 bp, synthetic construct
  misc_feature 1..114: note = Synthetic construct
  source 1..114: mol_type = other DNA
acctacgcacagaagttccagggcagagtcaccatgaccagggacacgtccacgagcacagtctacatggagctgagcagcctgagatctgaggacacggccgtgtattactgt

SEQ ID NO: 5115 - DNA, 114 bp, synthetic construct
  misc_feature 1..114: note = Synthetic construct
  source 1..114: mol_type = other DNA
acctacgcccagaagttccagggcagagtcaccatgaccagggacacgtccgcgagcacagtgtccatggagctgagcagcctgagatctgaggacacggccgtatattactgt

SEQ ID NO: 5116 - DNA, 114 bp, synthetic construct
  misc_feature 1..114: note = Synthetic construct
  source 1..114: mol_type = other DNA
aactatgcacagaagtttcagggcagggtcaccatgaccagggacacgtccatcagcacagcctacatggagctgagcaggctgagatctgacgacacggccgtgtattactgt

SEQ ID NO: 5117 - DNA, 114 bp, synthetic construct
  misc_feature 1..114: note = Synthetic construct
  source 1..114: mol_type = other DNA
tactatgcagagaagtttcggggcagggtcaccctgaccagggacacgtccatcagtacagtctacatggaggtgggcaggctgagatctgacgacacggccgtctattactgt

SEQ ID NO: 5118 - DNA, 114 bp, synthetic construct
  misc_feature 1..114: note = Synthetic construct
  source 1..114: mol_type = other DNA
aactatggtcagaaatttcaaggcagggtcaccatgaccagggacacgtccttcagcacagtttacatggatctgagcaggctgacatctgacgacacggccgtgtattactgt

SEQ ID NO: 5119 - DNA, 114 bp, synthetic construct
  misc_feature 1..114: note = Synthetic construct
  source 1..114: mol_type = other DNA
aagtacgcacagaagttccggggcagagtcaccatgaccagggacacgtccaccagcacagtatacatggacctgagcagcctgagatctgacgacacggccgtgtattactgt

SEQ ID NO: 5120 - DNA, 114 bp, synthetic construct
  misc_feature 1..114: note = Synthetic construct
  source 1..114: mol_type = other DNA
gccaacgaacagaagttccagggcagagtcaccatgaccagggacacgtccacgagcaccgtgtacatggagttgagcagcctgagatctgacgacacggccgtgttttactgt

SEQ ID NO: 5121 - DNA, 114 bp, synthetic construct
  misc_feature 1..114: note = Synthetic construct
  source 1..114: mol_type = other DNA
atctacgcacagaagttccagggcagagtcaccatgaccgaggacacatctacagacacagcctacatggacctgagcagcctgagatctgaggacacggccgtgtattactgt

SEQ ID NO: 5122 - DNA, 114 bp, synthetic construct
  misc_feature 1..114: note = Synthetic construct
  source 1..114: mol_type = other DNA
atctacgcacagaagttccagggcagagtcaccatgaccgaggacacatctacagacacagcctacatggagctgagcagcctgagatctgaggacacggccgtgtattactgt

SEQ ID NO: 5123 - DNA, 114 bp, synthetic construct
  misc_feature 1..114: note = Synthetic construct
  source 1..114: mol_type = other DNA
aaatattcacagaagttccagggcagaatcacccttaccagggacacatccgcgagcacagcctacatggaattgaacagtctgacatctgaagacacggctgtctattactgt

SEQ ID NO: 5124 - DNA, 114 bp, synthetic construct
  misc_feature 1..114: note = Synthetic construct
  source 1..114: mol_type = other DNA
aactacgcacagaagttccaggaaagagtcaccattaccagggacatgtccacaagcacagcctacatggagctgagcagcctgagatccgaggacacggccgtgtattactgt

SEQ ID NO: 5125 - DNA, 114 bp, synthetic construct
  misc_feature 1..114: note = Synthetic construct
  source 1..114: mol_type = other DNA
ttttacgcagactccgtgaagggccgattcaccatctccagagacaactccaagaaaacgatgtatctgcaaatgaacagtctgagacttgaggacacggctgtttattactgt

SEQ ID NO: 5126 - DNA, 114 bp, synthetic construct
  misc_feature 1..114: note = Synthetic construct
  source 1..114: mol_type = other DNA
aaatattcacagaagttccagggcagagtcaccattaccagggacacatccgcgagcacagcctacatggagctgagcagcctaaaatctgaagacacggctgtgtattattgt

SEQ ID NO: 5127 - DNA, 114 bp, synthetic construct
  misc_feature 1..114: note = Synthetic construct
  source 1..114: mol_type = other DNA
aaatattcacagaagttccagggcagagtcaccattaccagggacacatccgcgagcacagcctacatggagctgagcagcctgagatctgaagacacggctgtgtattactgt

SEQ ID NO: 5128 - DNA, 114 bp, synthetic construct
  misc_feature 1..114: note = Synthetic construct
  source 1..114: mol_type = other DNA
aaatattcacagaaattccagggcagagtcaccattaccagggccacatccgcgaccacagtctatttgggcctgaacagcctgacatctgaagacacggcactatattactgt

SEQ ID NO: 5129 - DNA, 114 bp, synthetic construct
  misc_feature 1..114: note = Synthetic construct
  source 1..114: mol_type = other DNA
aaatattcacagaagttccagggcagaatcaccattagcagtgacacatccgcgagtacagtctacatggaactgagtagcctgagatctgaagacacggctgtgtattactgt

SEQ ID NO: 5130 - DNA, 114 bp, synthetic construct
  misc_feature 1..114: note = Synthetic construct
  source 1..114: mol_type = other DNA
atgtatgcagcgagattccagggcagagtcaccataaccgcagacacatccacagacacaacgtacatgcagctgaccagcctgagatctgacgacacggccgtgtattattgt

SEQ ID NO: 5131 - DNA, 114 bp, synthetic construct
  misc_feature 1..114: note = Synthetic construct
  source 1..114: mol_type = other DNA
tactactcagactcagtgaagggccgattcaccatctccagagacaacgccaagaattccctgcatctggacatggacagtctgagagtcgaggacacggctgtctattattgt

SEQ ID NO: 5132 - DNA, 114 bp, synthetic construct
  misc_feature 1..114: note = Synthetic construct
  source 1..114: mol_type = other DNA
gaatacgccgcgtctgtggaaggcagattcaccatctcaagagatgaatcagagaactcgctgtatctgcaaatgaacaacctgagacccgaggacacggccatgtattattgt

SEQ ID NO: 5133 - DNA, 114 bp, synthetic construct
  misc_feature 1..114: note = Synthetic construct
  source 1..114: mol_type = other DNA
ttttatgcagactccgtgaagggccgattcaccatatccagagacaattccaaggacacactttttctcgaaatgaacagcctgagagacgacgacacggctgtctactactgt

SEQ ID NO: 5134 - DNA, 114 bp, synthetic construct
  misc_feature 1..114: note = Synthetic construct
  source 1..114: mol_type = other DNA
gactatgccgcgcctctgaaaggcagattcgtaatctcaagagatgattccaaaagtgtcgcctatcttcaaatcgacagcctgagcaccgacgacacaggcttctattattgt

SEQ ID NO: 5135 - DNA, 114 bp, synthetic construct
  misc_feature 1..114: note = Synthetic construct
  source 1..114: mol_type = other DNA
tactacgcagactccgtgaagggccgattcaccatctccagagacaattcgaagaacactctctatcttcaaatggacagcctgagagtcgaggacacggccgtgtattactgt

SEQ ID NO: 5136 - DNA, 114 bp, synthetic construct
  misc_feature 1..114: note = Synthetic construct
  source 1..114: mol_type = other DNA
ggatatgcagactcagtgaggggtcgattcaacatctccagagacgacgccaaaaattcattgtacctccacatgagcagcctgacaggcgacgacacggctgtctattactgt

SEQ ID NO: 5137 - DNA, 114 bp, synthetic construct
  misc_feature 1..114: note = Synthetic construct
  source 1..114: mol_type = other DNA
gagtatggagactctgtgaagggccgattcaccgtctccagggacagcgccgagagtgcaatttttcttgaaatgaacaccctgagagtcgaggacacggctgtctatttctgt

SEQ ID NO: 5138 - DNA, 114 bp, synthetic construct
  misc_feature 1..114: note = Synthetic construct
  source 1..114: mol_type = other DNA
ttctacgcagactctgtgaagggccgattcaccatctccagggacaacgccaagaactcactgtatctgcaaacgaacagcctgagagccgaggacacggctgtatattactgt

SEQ ID NO: 5139 - DNA, 114 bp, synthetic construct
  misc_feature 1..114: note = Synthetic construct
  source 1..114: mol_type = other DNA
tactatgtggacgctgtgaagggccgaatcaccatctccagagacaatgccaagaactcactgtatctgcaaatgaacagcctgagagccgaggacacggctgtatattattgt

SEQ ID NO: 5140 - DNA, 114 bp, synthetic construct
  misc_feature 1..114: note = Synthetic construct
  source 1..114: mol_type = other DNA
ttctatatagagtccgtgaggggccgcttcaccatctccagagacaattccaggaacacgatggatctgcagatgttgtcgttgagagtcgaggacacggccttatattattgt

SEQ ID NO: 5141 - DNA, 114 bp, synthetic construct
  misc_feature 1..114: note = Synthetic construct
  source 1..114: mol_type = other DNA
tactacgcagactctgtgaagggccgattcaccatctccagagacaacgccaagaattcactgtatttgcaaatgaacagcctgagagtcgaggacacggctgtttattactgt

SEQ ID NO: 5142 - DNA, 114 bp, synthetic construct
  misc_feature 1..114: note = Synthetic construct
  source 1..114: mol_type = other DNA
aactatgcagactcactgaagggccgattcaccatgtccagagacaatcccaagaagtccctgtatctgcaaatgaacagcctgagagccgaggacacgactgtgtgttgctgt

SEQ ID NO: 5143 - DNA, 114 bp, synthetic construct
  misc_feature 1..114: note = Synthetic construct
  source 1..114: mol_type = other DNA
acctatgcggactccgtgaagggccgattctccatctccagagacaacgccaagaacacgctgtatttgcagttgaacagtctgagagccgaggacacggctgtatattactgt

SEQ ID NO: 5144 - DNA, 114 bp, synthetic construct; identical to SEQ ID NO: 1788
  misc_feature 1..114: note = Synthetic construct
  source 1..114: mol_type = other DNA

SEQ ID NO: 5145 - DNA, 114 bp, synthetic construct
  misc_feature 1..114: note = Synthetic construct
  source 1..114: mol_type = other DNA
tattacgcagactccgtgaaggacagattcatcatctccagagacaattccaagaacaccttgtatcttcaaatgaacagcctgagagtcgaggacacggctatgtatttctgt

SEQ ID NO: 5146 - DNA, 114 bp, synthetic construct
  misc_feature 1..114: note = Synthetic construct
  source 1..114: mol_type = other DNA
tactttgcagcctcactgcggggccgctctaacatctccagagacgatcttaccaattcgctttttctggacataagtctcctgagagtcgaagatacggctacatattactgt

SEQ ID NO: 5147 - DNA, 114 bp, synthetic construct
  misc_feature 1..114: note = Synthetic construct
  source 1..114: mol_type = other DNA
ttctacgcagactccgtcaagggccggttcaccatctccagagacaattccaacaacgcgctgtctctgcaaatgaacagcctgagagccgaggacacggccgtatattactgt

SEQ ID NO: 5148 - DNA, 114 bp, synthetic construct
  misc_feature 1..114: note = Synthetic construct
  source 1..114: mol_type = other DNA
acctacgcagagaagtttcagggcagagtcacaattgccgcggacgcttccacgaacacagtctacatggagctcaggagcctgagatctgacgacacggccatgtattactgt

SEQ ID NO: 5149 - DNA, 114 bp, synthetic construct
  misc_feature 1..114: note = Synthetic construct
  source 1..114: mol_type = other DNA
ggttatgcacagaagttccagggcagagtgatcttttctagggacacttcctcaaggacggcctatatggagatcagcagtctgacatccgacgacacggccctttatttttgc

SEQ ID NO: 5150 - DNA, 114 bp, synthetic construct
  misc_feature 1..114: note = Synthetic construct
  source 1..114: mol_type = other DNA
aattccgcacagacgttgcacgccagagtcacgatcacgaccgacgagtccacgagcacagcctacatgcaactgagtagcctgacatctgaggacacggccgtctatttctgt

SEQ ID NO: 5151 - DNA, 114 bp, synthetic construct
  misc_feature 1..114: note = Synthetic construct
  source 1..114: mol_type = other DNA
aactacgcaccgaatttcgaaaatagagtcacaattacacgagagttgtctaccgaaacagtgtttatggaattgagaagcctcacagccgacgacacggccatgtattattgt

SEQ ID NO: 5152 - DNA, 114 bp, synthetic construct
  misc_feature 1..114: note = Synthetic construct
  source 1..114: mol_type = other DNA
aaatatgcagagaactttcagggcagagtctccctgaccgcagacacgtctacagacacagcctacatggaactgagcagcctgagatctgacgacacggccgtttattactgt

SEQ ID NO: 5153 - DNA, 114 bp, synthetic construct
  misc_feature 1..114: note = Synthetic construct
  source 1..114: mol_type = other DNA
aaggttgcacggaagtttcagggcagggtcaccctgaccagggacacgtccatcagtacagtctacatggacctgagtaggctgcggtctgacgacacggccgtctattactgt

SEQ ID NO: 5154 - DNA, 114 bp, synthetic construct
  misc_feature 1..114: note = Synthetic construct
  source 1..114: mol_type = other DNA
aactatgcacagaagttccaggacagggtcaccatgaccagggacacgtccatcagcacagcttacatggagttgagcaggctgagatctgacgacacggccgtgtattattgt

SEQ ID NO: 5155 - DNA, 114 bp, synthetic construct
  misc_feature 1..114: note = Synthetic construct
  source 1..114: mol_type = other DNA
ctgtatgcagcgaagttccagggcagagtctccataaccgcagacacgtccacaaacacagcctacatggagctgagaagcctgagatctgaggacacggccgtattttactgt

SEQ ID NO: 5156 - DNA, 114 bp, synthetic construct
  misc_feature 1..114: note = Synthetic construct
  source 1..114: mol_type = other DNA
aactatgcgcagaggtttcagggcagggtcaccttgaccagagacatgtccatcgggacagcctacatggaactgagcaggctgacatctgacgacacggccctttatttctgt

SEQ ID NO: 5157 - DNA, 114 bp, synthetic construct
  misc_feature 1..114: note = Synthetic construct
  source 1..114: mol_type = other DNA
aagtctgcacagagttttcaggacagagtcaccgtgaccagggacacgtccatcaacacggcctacctggaactgaggaggttgagatctgacgacacggccgtttattactgc

SEQ ID NO: 5158 - DNA, 114 bp, synthetic construct
  misc_feature 1..114: note = Synthetic construct
  source 1..114: mol_type = other DNA
agatattcaccgacatggcagggcagagtcacgtttgccagggacccaaccacgagtacggcctatatggaggtgaacagtctgacaacgtcagacacggctgtcttttattgt

SEQ ID NO: 5159 - DNA, 114 bp, synthetic construct
  misc_feature 1..114: note = Synthetic construct
  source 1..114: mol_type = other DNA
tactacgcagactccgtgaagggccggttcaccatctccagagacaattccaaggacaccttgtatctgcaaatgaacagcctgcgagccgaggacacggccgtatactactgt

SEQ ID NO: 5160 - DNA, 114 bp, synthetic construct; identical to SEQ ID NO: 1791
  misc_feature 1..114: note = Synthetic construct
  source 1..114: mol_type = other DNA

SEQ ID NO: 5161 - DNA, 114 bp, synthetic construct
  misc_feature 1..114: note = Synthetic construct
  source 1..114: mol_type = other DNA
atatctgcagagaagttccagggcagagtcaccataaccgcagacacgtctacagacacagccttcatggacctgagtagcctgagatctgaggacacggccgtgtattactgt

SEQ ID NO: 5162 - DNA, 114 bp, synthetic construct
  misc_feature 1..114: note = Synthetic construct
  source 1..114: mol_type = other DNA
gactacgcagactccgtgaagggccgattcaccatttcaaaagacaatatgaggaacacactgtatttgcaactaaatagcctgagacctgaggacacggctgtctttttctgt

SEQ ID NO: 5163 - DNA, 114 bp, synthetic construct
  misc_feature 1..114: note = Synthetic construct
  source 1..114: mol_type = other DNA
gactacgcacagaagtttcagggcagggtcacgatcaccacggacgaagacacgagcactgcctacttggttttgaccagtctgacatcagaagacacggccgtatatttctgt

SEQ ID NO: 5164 - DNA, 114 bp, synthetic construct
  misc_feature 1..114: note = Synthetic construct
  source 1..114: mol_type = other DNA
aactacgcacagaagttccaggacagagtcacaattaccgcggacatgtccacgagtacagcctacatggaaattagtggcctgacatctgaggacacggccatctattactgt

SEQ ID NO: 5165 - DNA, 114 bp, synthetic construct
  misc_feature 1..114: note = Synthetic construct
  source 1..114: mol_type = other DNA
gacatcgctcaggcattccaagacagagtcactcttaccagggacgaatctaagaatacagcctacatggaactgagcaacctgagatctggggacacggccatttattactgt

SEQ ID NO: 5166 - DNA, 114 bp, synthetic construct
  misc_feature 1..114: note = Synthetic construct
  source 1..114: mol_type = other DNA
aattacgcacaaaagttcaagggcagagtcacgattagtgcggacgactccccgagtgcagcctacttggagctgagcagcctgacacctgaagacacggccatttattactgt

SEQ ID NO: 5167 - DNA, 114 bp, synthetic construct
  misc_feature 1..114: note = Synthetic construct
  source 1..114: mol_type = other DNA
tacttcgcaaactcagtgaagggccgaatcaccatctccagagacaactccaagaactcactgtttctgcaaatcaacagcctgcgagacgaggacacggctacttattactgt

SEQ ID NO: 5168 - DNA, 114 bp, synthetic construct
  misc_feature 1..114: note = Synthetic construct
  source 1..114: mol_type = other DNA
tactacgcagactctgtgaagggccgattcaccatctccagagacaactccaagagctcactgtatctgcaaatgaacagcctgagagtcgaggacacggctgtttattattgt

SEQ ID NO: 5169 - DNA, 114 bp, synthetic construct
  misc_feature 1..114: note = Synthetic construct
  source 1..114: mol_type = other DNA
acgtatgcccagggcttcccaggacggtttgtcttctccttggacacctctgtcagcacgacatatctgcagatcagcagcctaaaggctgaggacactgccatgtatttctgt

SEQ ID NO: 5170 - DNA, 114 bp, synthetic construct
  misc_feature 1..114: note = Synthetic construct
  source 1..114: mol_type = other DNA
tcctatgtggactctgtgctgggccgattcaccatctccagagacaacgccaagaactcactgtatcttcacgtgagcagcctgagagtcgaggacacggcaatgtattactgt

SEQ ID NO: 5171 - DNA, 114 bp, synthetic construct
  misc_feature 1..114: note = Synthetic construct
  source 1..114: mol_type = other DNA
tattatgcagactccgtgaagggccggttcaccatctccagagacaattccaagaacatgatatatctggaaatgaacagcctgcgagccgacgacacggccctatattactgt

SEQ ID NO: 5172 - DNA, 114 bp, synthetic construct
  misc_feature 1..114: note = Synthetic construct
  source 1..114: mol_type = other DNA
caccttctggactctgtgaagggccgattcaccatctccagagacaacgccaagaactcagtgtatctgcaaatgaacagcctgagaggcgaggacacgggaatgtattactgt

SEQ ID NO: 5173 - DNA, 114 bp, synthetic construct
  misc_feature 1..114: note = Synthetic construct
  source 1..114: mol_type = other DNA
gaatatgccgcgtctgtgaaaggcagaagtaacatcacaagagatgattccagaaacatcgtctatttatatgtggacagcctgaaaatggaggacacggccgtctattattgt

SEQ ID NO: 5174 - DNA, 114 bp, synthetic construct; identical to SEQ ID NO: 1787
  misc_feature 1..114: note = Synthetic construct
  source 1..114: mol_type = other DNA

SEQ ID NO: 5175 - DNA, 114 bp, synthetic construct
  misc_feature 1..114: note = Synthetic construct
  source 1..114: mol_type = other DNA
gactacgctgcagccgtgagaggcagattcaccatctcaagagacgattcaaaaaaaactctctatctgcaaatgaatagactgaagatggaggacaccgccgtgtattactgc

SEQ ID NO: 5176 - DNA, 114 bp, synthetic construct
  misc_feature 1..114: note = Synthetic construct
  source 1..114: mol_type = other DNA
gactacgccgcgtctctgaaaggcagattcaccattacaagagatgatcccaaaaacatcacctatctacaaatgaacagcctgacaaccgaggacacagccgtctattattgt

SEQ ID NO: 5177 - DNA, 114 bp, synthetic construct
  misc_feature 1..114: note = Synthetic construct
  source 1..114: mol_type = other DNA
gcctacgcacagaagttccagggcagagtcgccatggccagggacacgtccacgaccacattctacgtggagttgagcagtctgacatctgacgacacggccttatatttctgt

SEQ ID NO: 5178 - DNA, 114 bp, synthetic construct
  misc_feature 1..114: note = Synthetic construct
  source 1..114: mol_type = other DNA
aactacgcagcctccgtgaatgggcgattcaccatctccagagacaactccaagaacacgttatatctccaaatgaacagcctgagacctgaagacacggctgtttattactgt

SEQ ID NO: 5179 - DNA, 114 bp, synthetic construct
  misc_feature 1..114: note = Synthetic construct
  source 1..114: mol_type = other DNA
atttacagtccatctctgagtaacagactcaccatcaccaaggacacctccagacaccaagtggtcctcacattgaccgacgtgggccctgttgacacagccacatacttctgt

SEQ ID NO: 5180 - DNA, 114 bp, synthetic construct
  misc_feature 1..114: note = Synthetic construct
  source 1..114: mol_type = other DNA
aagtatgcacagaacttccagggcagaatgaatgtgaccatagacacacccacgagcacagcctacatggagctgaggagcctgaaatctgacgacacggccgtgtattactgt

SEQ ID NO: 5181 - DNA, 114 bp, synthetic construct
  misc_feature 1..114: note = Synthetic construct
  source 1..114: mol_type = other DNA
tattacgcagactccgtgaagggccgattcaccttcgccacagacatttccaagaacaccttttatctgcaaatgaaccgcctgcgagttgaggacacggctatatattactgt

SEQ ID NO: 5182 - DNA, 114 bp, synthetic construct
  misc_feature 1..114: note = Synthetic construct
  source 1..114: mol_type = other DNA
caatattcgcagaatttacaaggcagagtcaccattaccagggacacatccgcgagcacggttgacatggaactgaggagcctgacatctgtagacacggctgtgtattactgt

SEQ ID NO: 5183 - DNA, 114 bp, synthetic construct
  misc_feature 1..114: note = Synthetic construct
  source 1..114: mol_type = other DNA
gtctcttcacagaagttccagggcagagtcacctttagcgtgaacacctccttgaatacagcctacatggcgctgagcagcctcacatctgaagacacggccgtctactactgt

SEQ ID NO: 5184 - DNA, 114 bp, synthetic construct
  misc_feature 1..114: note = Synthetic construct
  source 1..114: mol_type = other DNA
aattatgcacggatgttccagggcagagtcacgattaccgcggacgaatcgtcgaaaactgcctacatggagttgaaacgcctgacatctgaggacacggccgtctattactgt

SEQ ID NO: 5185 - DNA, 114 bp, synthetic construct
  misc_feature 1..114: note = Synthetic construct
  source 1..114: mol_type = other DNA
gacatcgcacagaagttccgtgacagagtcactttttccgcggacccatcgacaggaactgtctacatggagctgactgacctcagatttggggacacggccacctactactgt

SEQ ID NO: 5186 - DNA, 114 bp, synthetic construct
  misc_feature 1..114: note = Synthetic construct
  source 1..114: mol_type = other DNA
aactacgcacagaaattccagggcagagtcacaattagcgcggacgaatctacgaacacagtttacatggacctgagcagcctgagatctgaagacacggccatgtattactgt

SEQ ID NO: 5187 - DNA, 114 bp, synthetic construct
  misc_feature 1..114: note = Synthetic construct
  source 1..114: mol_type = other DNA
aagtacgcacagaagttccaggacagagtcacaattacatcggacgaatcctcgaccactgcctacctagacctgcgcaacctgacatctgaagacacggccgtctattactgt

SEQ ID NO: 5188 - DNA, 114 bp, synthetic construct
  misc_feature 1..114: note = Synthetic construct
  source 1..114: mol_type = other DNA
tcctacagtacatctctgaagaccagactcactatctccaaggacacctccaaaagtcaggtggtccttatcatgaccaatttggaccctgtggacacagccacatattactgt

SEQ ID NO: 5189 - DNA, 114 bp, synthetic construct
  misc_feature 1..114: note = Synthetic construct
  source 1..114: mol_type = other DNA
tactacagcacatctctgaagaccaggctcaccatctccaaggacacctccaaaaaccaggtggtcctttcaatgaccaacatggaccctgtggacacagccacgtattactgt

SEQ ID NO: 5190 - DNA, 114 bp, synthetic construct
  misc_feature 1..114: note = Synthetic construct
  source 1..114: mol_type = other DNA
aactacgcagcgcacttcaaagacagattgaagatgaccacggacgagtccacaaacaccgccttcatggaactgagcaatctgacttctgacgacacggccacatactactgc

SEQ ID NO: 5191 - DNA, 114 bp, synthetic construct
  misc_feature 1..114: note = Synthetic construct
  source 1..114: mol_type = other DNA
aaatattcacagaggctcgagggcagagtcaccatgaccacagacacatccacgaacacagcctacatggagctgaggaggctgagatctgacgacacggccgtttattactgt

SEQ ID NO: 5192 - DNA, 114 bp, synthetic construct
  misc_feature 1..114: note = Synthetic construct
  source 1..114: mol_type = other DNA
agatacagcccgtccttccgaggccaggtcattatttcagccgacaagtccgtcgagaccgcctacctgcagtggagcagcctgaagtcctcggacactgccatctattactgt

SEQ ID NO: 5193 - DNA, 114 bp, synthetic construct
  misc_feature 1..114: note = Synthetic construct
  source 1..114: mol_type = other DNA
agatatagcccgtccttccaaggccaggtcaccatctcagccgacaagtccatcaacaccgcctacctacagtggagtagcctgaaggcctcggacaccgccatgtattattgt

SEQ ID NO: 5194 - DNA, 114 bp, synthetic construct
  misc_feature 1..114: note = Synthetic construct
  source 1..114: mol_type = other DNA
aactacaccccgtcgctcaagagtcgagtcaccatttcactagacacatccaagaatctggtgtccctgaggttgcggtctgtgaccgccgcggacacggctctttataactgt

SEQ ID NO: 5195 - DNA, 114 bp, synthetic construct
  misc_feature 1..114: note = Synthetic construct
  source 1..114: mol_type = other DNA
ttctatgaagactccgtgaagggccgattcatcatatccagacacagttccaagaacatcgtgtatcttcaaatgaacaccctgatacttcaggacgcggccgtctatttttgt

SEQ ID NO: 5196 - DNA, 114 bp, synthetic construct
  misc_feature 1..114: note = Synthetic construct
  source 1..114: mol_type = other DNA
gaatacgccgagtctgtgaaaggcagattcaccatctcaagagatgattccaaaagtatcgcctatctacaaatgaacagcctgaagaccgaggacacagccgtgtattactgt

SEQ ID NO: 5197 - DNA, 114 bp, synthetic construct
  misc_feature 1..114: note = Synthetic construct
  source 1..114: mol_type = other DNA
ttttacaagacatctctgaagaccagactcaacatctccaaggacacctccaaaaaccaggtggtccttacaatgatcaacatggaccccgtggacacagccacatattattgt

SEQ ID NO: 5198 - DNA, 114 bp, synthetic construct
  misc_feature 1..114: note = Synthetic construct
  source 1..114: mol_type = other DNA
tactacagcacatctctgaagaccaggctcaccatctccaaggacacctccagtaaccaggtggtccttacaatgaccaccatggaccctgtggacacagccacgtatttctgt

SEQ ID NO: 5199 - DNA, 114 bp, synthetic construct
  misc_feature 1..114: note = Synthetic construct
  source 1..114: mol_type = other DNA
tcctacagcacatctctgaagagcaggctcaccatctccaaggacccctccaaaagccaggtggtccttaccatgaccaatctggaccctgtggacacagccacatattactgt

SEQ ID NO: 5200 - DNA, 114 bp, synthetic construct
  misc_feature 1..114: note = Synthetic construct
  source 1..114: mol_type = other DNA
ttttacaactcatctctgaggtccagactcaccatctccaaggacacctccaaaagccaagttgtccttacactgaccaacatggaccctgtggacacaggcacctatttctgt

SEQ ID NO: 5201 - DNA, 114 bp, synthetic construct
  misc_feature 1..114: note = Synthetic construct
  source 1..114: mol_type = other DNA
ttctatagcacatctctgaagaccaggctcaccatctccaaggacacctccaaaaaccaggtggtccttacaatgaccaacatggaccctgtggacacagccacgtattactgc

SEQ ID NO: 5202 - DNA, 114 bp, synthetic construct
  misc_feature 1..114: note = Synthetic construct
  source 1..114: mol_type = other DNA
ttctacagcacatctctgaagaccaggctcaccatctccaaggacacctccaaaaaccaggtggtccttacaatgaccaacatggaccctgtggacacagccacgtattactgt

SEQ ID NO: 5203 - DNA, 114 bp, synthetic construct
  misc_feature 1..114: note = Synthetic construct
  source 1..114: mol_type = other DNA
tactacagtacatctctgaagaccaggctcaccatctccaaggacacctccaaaaaccaggtggtccttacaatgaccaacatggaccctgtggacacagccacgtattactgt

SEQ ID NO: 5204 - DNA, 114 bp, synthetic construct
  misc_feature 1..114: note = Synthetic construct
  source 1..114: mol_type = other DNA
tcctacaggccgtccctgaagagtcggctcaccatctcccaggacacctccaagaaccaggtgttccttaatatgaccaatgtggaccctggggacacagccacttactattgt

SEQ ID NO: 5205 - DNA, 114 bp, synthetic construct
  misc_feature 1..114: note = Synthetic construct
  source 1..114: mol_type = other DNA
gaatacgccgcgtctgtgcggcgcagattcaccatctcaagagatgattccaaaaacatcgtctatctgcaaatgaacagcctgagaaccgaggacacaggcgtctattactgt

SEQ ID NO: 5206 - DNA, 114 bp, synthetic construct
  misc_feature 1..114: note = Synthetic construct
  source 1..114: mol_type = other DNA
tactacagcacatctctgaagaccaggctcaccatctccaaggacacctcaacaaaccgggtggtcctgacaatgaccaacatggaccctgtggacacagccacttattactgt

SEQ ID NO: 5207 - DNA, 114 bp, synthetic construct
  misc_feature 1..114: note = Synthetic construct
  source 1..114: mol_type = other DNA
tattacagagactctgtgagggggcgcttcaccgtgtcccgagacaactccaaaaatacagtgtttctgcaaatggacaacctgggagtcgacgacacgggcatttacttctgt

SEQ ID NO: 5208 - DNA, 114 bp, synthetic construct
  misc_feature 1..114: note = Synthetic construct
  source 1..114: mol_type = other DNA
ttttacagcacatctctgaaggccaggctcaccgtctccaaggacacctccaaaaaccaggtggtcctcacaatgaccaacatggaccctatagacacagccacgtattactgt

SEQ ID NO: 5209 - DNA, 114 bp, synthetic construct
  misc_feature 1..114: note = Synthetic construct
  source 1..114: mol_type = other DNA
cgctacaggccatctctgaagagcagactcaccatcaccaaggacacctccaaaaaccaggtggtccttacaatgaccaacgtggaccctgtggacacagccacatatttctgt

SEQ ID NO: 5210 - DNA, 114 bp, synthetic construct
  misc_feature 1..114: note = Synthetic construct
  source 1..114: mol_type = other DNA
aggaagaggccgtctctggagaccagggtcaccatcaccaaggacaccgccaaaaaccaggtggtctttacactgaccgacatggaccctgtggacacaggcacctattactgt

SEQ ID NO: 5211 - DNA, 114 bp, synthetic construct
  misc_feature 1..114: note = Synthetic construct
  source 1..114: mol_type = other DNA
cgctacagcccatctctgaagaccagactcaccatcaccaaggacacctccacaaaccaggtggtccttacattgatcaacatggaccctgtggacacagccacatattactgc

SEQ ID NO: 5212 - DNA, 114 bp, synthetic construct
  misc_feature 1..114: note = Synthetic construct
  source 1..114: mol_type = other DNA
cgctacagcccatctctgaagagcaggctcaccatcaccaaggacacctccaaaaaccaggtgttccttacaatgaccaacatggaccctgtggacacagccacatattactgt

SEQ ID NO: 5213 - DNA, 114 bp, synthetic construct
  misc_feature 1..114: note = Synthetic construct
  source 1..114: mol_type = other DNA
cgctacagcccatctctgaagaacagactcagcatcaccaaggacacctccaaaaatcaggtggtccttacaatgaccaacgtggaccctgtggacacagccacatattactgt

SEQ ID NO: 5214 - DNA, 114 bp, synthetic construct
  misc_feature 1..114: note = Synthetic construct
  source 1..114: mol_type = other DNA
cgatacagtccgtctctgagggccaggctcaccgtcacgaaggacacctccaaaaaccaggtggtctttagaatgataaacatggaccctgtggacacagccacatatttctgt

SEQ ID NO: 5215 - DNA, 114 bp, synthetic construct
  misc_feature 1..114: note = Synthetic construct
  source 1..114: mol_type = other DNA
cgttacagcccatctctgaagagcaggctcaccatcaccaaggacacctccaaaaaccaggtggtccttacaatgaccaacatggaccctgtggacacagccagatattactgt

SEQ ID NO: 5216 - DNA, 114 bp, synthetic construct
  misc_feature 1..114: note = Synthetic construct
  source 1..114: mol_type = other DNA
tggtacagcccatctttgaagagcaggctcaccatcaccaaggacacctccaaaaaccaggtggtccttacaatgaccaacatggaccctgtggacacagcaacatattactgt

SEQ ID NO: 5217 - DNA, 114 bp, synthetic construct
  misc_feature 1..114: note = Synthetic construct
  source 1..114: mol_type = other DNA
gtttacgctgactccgtgaagggccggttcaccctctccagagacaattccgagaacacgttgtctctgcaaatgaacagcctgagagtcgaggacacggccctatattactgt

SEQ ID NO: 5218 - DNA, 114 bp, synthetic construct
  misc_feature 1..114: note = Synthetic construct
  source 1..114: mol_type = other DNA
aactacgcagattctgtgaagggccgattcaccatctccagagacaacgccaagaattccgtgtatttgcagctgagcagtctgagagtcgaggatacggctgtttattactgt

SEQ ID NO: 5219 - DNA, 114 bp, synthetic construct
  misc_feature 1..114: note = Synthetic construct
  source 1..114: mol_type = other DNA
gactacaacccctccctcaagagtcgagtcaccatatcagtagacacgtccaagaaccagttctccctggagctgagctctgtgaccgccgcagacacggccatgtattactgt

SEQ ID NO: 5220 - DNA, 114 bp, synthetic construct
  misc_feature 1..114: note = Synthetic construct
  source 1..114: mol_type = other DNA
gattatgcagtatctgtgaaaagtcgaataaccatcaacccagacacatccaagaaccagttctccctgcagctgaactctgtgactcccgaggacacggctgtgtattactgt

SEQ ID NO: 5221 - DNA, 114 bp, synthetic construct
  misc_feature 1..114: note = Synthetic construct
  source 1..114: mol_type = other DNA
tactacaacccgtccctcaagagtcgaatttccatatcagcagacacggccaagaaccagttctccctggaggtgaagtctgtgaccgccgcggacacggccgtgtattactgc

SEQ ID NO: 5222 - DNA, 114 bp, synthetic construct
  misc_feature 1..114: note = Synthetic construct
  source 1..114: mol_type = other DNA
aattacaatccctccctccagagtcgagccaccatatcactagacacgaccaacaaccagttctccctgaagttgagctctgtgaccgctgcggacacggccgtatattactgt

SEQ ID NO: 5223 - DNA, 114 bp, synthetic construct
  misc_feature 1..114: note = Synthetic construct
  source 1..114: mol_type = other DNA
aagtataacccgtcactcaagagtcgagtcagcatttcagtagacacgtccaagaggcagatctccctcaaagtgatttctgtgaccgccgcggacacggctatatattattgt

SEQ ID NO: 5224 - DNA, 114 bp, synthetic construct
  misc_feature 1..114: note = Synthetic construct
  source 1..114: mol_type = other DNA
agctacgacccctccctcaagagtcgagtctccatgtcagtagacacgtccaggaatcagttctccctgaaactgacctctgtgaccgctgctgacacggccgtttattactgt

SEQ ID NO: 5225 - DNA, 114 bp, synthetic construct
  misc_feature 1..114: note = Synthetic construct
  source 1..114: mol_type = other DNA
aagtacggcccctccctcaagagtcgagtcaccatgtcagtagacacttccaagaaccagttctccctgacactgacctctgtgaccgctgcggacacggccatatattactgt

SEQ ID NO: 5226 - DNA, 114 bp, synthetic construct
  misc_feature 1..114: note = Synthetic construct
  source 1..114: mol_type = other DNA
aactacaatccctccctcaagaggcgagtctccatatcagtagacacataccagaaccaattctccctgaaactgagttctgtgaccgccgcagacacggccgtatattactgt

SEQ ID NO: 5227 - DNA, 114 bp, synthetic construct
  misc_feature 1..114: note = Synthetic construct
  source 1..114: mol_type = other DNA
aattacaacccttccctcacgagtcgagtctccatgtcaatagagacgtccaagaaccagttctccttgaggctgacctctgtgaccgccgcagacacggccgtatatttctgt

SEQ ID NO: 5228 - DNA, 114 bp, synthetic construct
  misc_feature 1..114: note = Synthetic construct
  source 1..114: mol_type = other DNA
aactacagcccctccctcttgagtcgagtcaccatatcagtggacacgtccaggaaccacctctccctgaggctgagctctgtgaccgccgcagacacggccgtgtattactgt

SEQ ID NO: 5229 - DNA, 114 bp, synthetic construct
  misc_feature 1..114: note = Synthetic construct
  source 1..114: mol_type = other DNA
gaatacaacccctccctcaagagtcgagtcaccatatcagtagacccgtccaagaaccacttctctttgaagctgacctctgtgaccgcctcagacacggccgtgtattactgt

SEQ ID NO: 5230 - DNA, 114 bp, synthetic construct
  misc_feature 1..114: note = Synthetic construct
  source 1..114: mol_type = other DNA
tactacaacccctccctcaggagtcgagtcaccatgtcagttgacacgtccaagaatcagttctccctgaatctgagttctgtgaccgctgcggacacggccgtctattactgt

SEQ ID NO: 5231 - DNA, 114 bp, synthetic construct
  misc_feature 1..114: note = Synthetic construct
  source 1..114: mol_type = other DNA
aactacaacccctccctcaagagtcgagtcgccatatcagtagacacgtccaggagccagttttccctgaaacttacttctgtgaccgctgcggacacggccgtgtatttctgt

SEQ ID NO: 5232 - DNA, 114 bp, synthetic construct
  misc_feature 1..114: note = Synthetic construct
  source 1..114: mol_type = other DNA
aactacaacccctccctcaagagtcgagtctccatatcactggacgagtccaggaaccagttctccctgaagctgacctctatgaccgctgcggacacggccatatattattgt

SEQ ID NO: 5233 - DNA, 114 bp, synthetic construct
  misc_feature 1..114: note = Synthetic construct
  source 1..114: mol_type = other DNA
aattacaactccgccctcaagagtcgagtctccatgtccctggacacgtccaagaaccagttctccctgaggctgacgtctgtgaccgctgcggacacggccgtctactactgt

SEQ ID NO: 5234 - DNA, 111 bp, synthetic construct
  misc_feature 1..111: note = Synthetic construct
  source 1..111: mol_type = other DNA
tacaacccgtccctcaagagtcgagtcaccatatcaatagacacgtccaagaaccaggtctccctgaaattgagctctgtgaacgccgcggacacggctgtgtattactgt

SEQ ID NO: 5235 - DNA, 114 bp, synthetic construct
  misc_feature 1..114: note = Synthetic construct
  source 1..114: mol_type = other DNA
aactacaacccctccctcaagagtcgagtcaccatatcaatagacacgtccaagaaccagttctccctgaagctgagctctgtgaccgctgcggacacggccgtgtattactgt

SEQ ID NO: 5236 - DNA, 114 bp, synthetic construct
  misc_feature 1..114: note = Synthetic construct
  source 1..114: mol_type = other DNA
aactacaatccctccctcaagagtcgagtcaccatagcagtagacacgtccaagaaccagttctccctgaagctgacctctgtgaccgctgcggacacggccgtgtattactgt

SEQ ID NO: 5237 - DNA, 114 bp, synthetic construct
  misc_feature 1..114: note = Synthetic construct
  source 1..114: mol_type = other DNA
aactacaacccctcactcaagggtcgagtcaccttatcagtagacacgtccaagaaccagttctccctgaagctgagctctgtgaccgctgcggacacggccgtgtattactgt

SEQ ID NO: 5238 - DNA, 114 bp, synthetic construct
  misc_feature 1..114: note = Synthetic construct
  source 1..114: mol_type = other DNA
acctacaattcctccctcaggagtcgagtcaccatgtcagtagacacgtccaagaaccagttctccctgaagctgacctctgtgaccgccgcggacacggccgtctattactgt

SEQ ID NO: 5239 - DNA, 114 bp, synthetic construct
  misc_feature 1..114: note = Synthetic construct
  source 1..114: mol_type = other DNA
tcctataacccgtccctcacgagtcgagtcagtctgtcactagataagtccaagaaccagttctccctggatctgacctctgtgaccgcctctgacacgggcgtctattactgc

SEQ ID NO: 5240 - DNA, 114 bp, synthetic construct
  misc_feature 1..114: note = Synthetic construct
  source 1..114: mol_type = other DNA
aactataacccctccctcaagagtcgagtcaccatatcagtagacacgtccaagaaccagttctccctgaagctgagctctgtgaccgccgcagacacggccgtgtattactgt

SEQ ID NO: 5241 - DNA, 114 bp, synthetic construct
  misc_feature 1..114: note = Synthetic construct
  source 1..114: mol_type = other DNA
aattacaacccctccctcaggagtcgagtcaccatatcaatagataggtccaagagccagttctccctgaagttaaactctgtgaccgccgcggacacggccgtgtatttctgt

SEQ ID NO: 5242 - DNA, 114 bp, synthetic construct
  misc_feature 1..114: note = Synthetic construct
  source 1..114: mol_type = other DNA
aactacaattcctccctcaagagtcgagtcaccatatcactagacacgtccaagagccagttctccctgaagctgaggtctctgaccgccgcagacacggccgtctattactgt

SEQ ID NO: 5243 - DNA, 114 bp, synthetic construct
  misc_feature 1..114: note = Synthetic construct
  source 1..114: mol_type = other DNA
aactccaacccctccctccggagtcgagtcaccatatcactagacgagtccgggaaccagttttccctgaggttaaactctgcgaccgctgcggacgcggccatttattactgt

SEQ ID NO: 5244 - DNA, 114 bp, synthetic construct
  misc_feature 1..114: note = Synthetic construct
  source 1..114: mol_type = other DNA
cagtacaacccctccctccagagtcgagtcaccctttcagtagacacgtccaagaaccagttctccctgcagctgagctctgtgaccgccgcagacacggccgtgtattactgt

SEQ ID NO: 5245 - DNA, 114 bp, synthetic construct
  misc_feature 1..114: note = Synthetic construct
  source 1..114: mol_type = other DNA
acctacagcccgtcccccaagagccgagtcaccgtatcagcagacacgtccaagaatcagttctccctgaagctgagttctgtgaccgccgcagacacggccgtgtattactgt

SEQ ID NO: 5246 - DNA, 114 bp, synthetic construct
  misc_feature 1..114: note = Synthetic construct
  source 1..114: mol_type = other DNA
cactacaatccctccctgaagaatcgggcctccgtgtcactggacacctccaggaattcattttccttgcgcctgacgtcagtgaccgccgcagactcggccatttattactgc

SEQ ID NO: 5247 - DNA, 114 bp, synthetic construct
  misc_feature 1..114: note = Synthetic construct
  source 1..114: mol_type = other DNA
cacgacaacccgtccctccagagtcgagtcaccatgtcagtggacacgtacaagcagcaattctccctgacactgacgtctctgaccgccgcggacacggctgtctactactgt

SEQ ID NO: 5248 - DNA, 114 bp, synthetic construct
  misc_feature 1..114: note = Synthetic construct
  source 1..114: mol_type = other DNA
aactacaggccgtcgctcaagagtcgagtcatcatatcaggagacacgtccaagaagcagttctccctgaggctgccctctgtgaccgccgcggacacggctgtatattactgt

SEQ ID NO: 5249 - DNA, 114 bp, synthetic construct
  misc_feature 1..114: note = Synthetic construct
  source 1..114: mol_type = other DNA
aactacaacccgtccctcaagagccgagtcaccatatcagcagacacgtccaagaaccagttctccctgacattgaggtctgtgaccgccgcggacacggcgatgtattactgt

SEQ ID NO: 5250 - DNA, 114 bp, synthetic construct
  misc_feature 1..114: note = Synthetic construct
  source 1..114: mol_type = other DNA
aactacaacccgtccctcaagagtcgagtcaccatatcagtagacacgtccaagaaccagttctccctgaagctgagctctgtgaccgccgcggacacggctgtgtattactgt

SEQ ID NO: 5251 - DNA, 114 bp, synthetic construct
  misc_feature 1..114: note = Synthetic construct
  source 1..114: mol_type = other DNA
aactacagcccgtccctcaagagtcgagtcaccatatcagtagacacgtccaaaaaccagttctccctgaagctgagctctgtgaccgccgcggacacggctgtgtattactgt

SEQ ID NO: 5252 - DNA, 114 bp, synthetic construct
  misc_feature 1..114: note = Synthetic construct
  source 1..114: mol_type = other DNA
aactacaacccgtccctcaagagtcgagtcaccatatcactagacacgtccaagaaccagttctccctgaagctgagctctgtgaccgccgcggacacggctgtgtattactgt

SEQ ID NO: 5253 - DNA, 114 bp, synthetic construct
  misc_feature 1..114: note = Synthetic construct
  source 1..114: mol_type = other DNA
aactacatcccgtccctcaagagtcgagtcaccatatcagtagacacgtccaagaaccagttctccctgaagctgagctctgtgaccgccgcggacacggctgtgtattactgt

SEQ ID NO: 5254 - DNA, 114 bp, synthetic construct
  misc_feature 1..114: note = Synthetic construct
  source 1..114: mol_type = other DNA
aactacaatccgtccctcaagaatcgagtcaccatctcactagacaagtccaagaaccaattctccctcaaaatgacctctgtgaccgccgcggacacggctatctattactgt

SEQ ID NO: 5255 - DNA, 114 bp, synthetic construct
  misc_feature 1..114: note = Synthetic construct
  source 1..114: mol_type = other DNA
aaatacaacccgtccctcaagagtcgagtcaccacttcagtagacacgtctaagaatcaattctccctgaaactgaggtctctgaccgccgcggacacggctgtttattactgt

SEQ ID NO: 5256 - DNA, 114 bp, synthetic construct
  misc_feature 1..114: note = Synthetic construct
  source 1..114: mol_type = other DNA
aactacaacccgtccctccagagtcgagtcaccatatcagcagacacgtccaagagccaattctccctgaatctgaggtctgtgaccgccgcggacacggctgtttattactgt

SEQ ID NO: 5257 - DNA, 114 bp, synthetic construct
  misc_feature 1..114: note = Synthetic construct
  source 1..114: mol_type = other DNA
aactccaacccgtccctcaagagtcgagtcaccatgtcagtagacacgtccaagaaccagttctccctgaagctgagctctgtgaccgccgcggacacggctgtctattactgt

SEQ ID NO: 5258 - DNA, 114 bp, synthetic construct
  misc_feature 1..114: note = Synthetic construct
  source 1..114: mol_type = other DNA
aattacaacccgtccctcaagagtcgagtcaccatttcagtcgacacgtccaagaatcagttctccctgaagttgacttctgtcaccgccgcggacacggctgtttattattgt

SEQ ID NO: 5259 - DNA, 114 bp, synthetic construct
  misc_feature 1..114: note = Synthetic construct
  source 1..114: mol_type = other DNA
aactacaacccctccctcaagagtcgagtcaccatttcattagacacgtccaggaaccagttctccctgaggctgaggtctgtgaccgctgcggacacggccgtctattactgt

SEQ ID NO: 5260 - DNA, 114 bp, synthetic construct
  misc_feature 1..114: note = Synthetic construct
  source 1..114: mol_type = other DNA
gactacaacccgtccctcaagagtcgagttaccatatcaggagacacgtccaggaaccagttctccctgaagctgacctctgtgaccgccgcggacacggccgtgtattactgt

SEQ ID NO: 5261 - DNA, 114 bp, synthetic construct
  misc_feature 1..114: note = Synthetic construct
  source 1..114: mol_type = other DNA
tactacaacccgtccctcaagagtcgagtcaccatatcagtagacaggtccaagaaccagttctccctgaagctgagctctgtgaccgccgcggacacggccgtgtattattgt

SEQ ID NO: 5262 - DNA, 114 bp, synthetic construct
  misc_feature 1..114: note = Synthetic construct
  source 1..114: mol_type = other DNA
tattacaacccgtccctcaagagtcgatttaccatgtcaatagacacggccaagaatcagttctccctgaacctgaactctgtgaccgccgcggacacggccgtctattactgt

SEQ ID NO: 5263 - DNA, 114 bp, synthetic construct
  misc_feature 1..114: note = Synthetic construct
  source 1..114: mol_type = other DNA
gactacagcccctccctcaagagtcgagccaccatatcaattgacccatcgaagagtcagtttttcctgaagttgaggtctgtgaccgccgctgacacggccgtatattactgt

SEQ ID NO: 5264 - DNA, 114 bp, synthetic construct
  misc_feature 1..114: note = Synthetic construct
  source 1..114: mol_type = other DNA
aagtacaacccctccctcaagagtcgaggcaccatatcagtagacacgtccaaaaaccagttctccctgaagctgagctctgtgaccgctgcggacacggccgtgtatttctgt

SEQ ID NO: 5265 - DNA, 114 bp, synthetic construct
  misc_feature 1..114: note = Synthetic construct
  source 1..114: mol_type = other DNA
aagtacgacccctccctcacgagtcgagtcaccatatcagtggacacgtccaagaaccagattaccctgaacctgacctctgtgaccgccgcggacacggccgtgtattattgt

SEQ ID NO: 5266 - DNA, 114 bp, synthetic construct
  misc_feature 1..114: note = Synthetic construct
  source 1..114: mol_type = other DNA
aactacaacccctccctcaagagtcgagtcaccatttcattagacacgtccaacaaccagttctccctgaagctgagctctgtgaccgccgcagacacggccgtttattactgt

SEQ ID NO: 5267 - DNA, 114 bp, synthetic construct
  misc_feature 1..114: note = Synthetic construct
  source 1..114: mol_type = other DNA
aactacaacccctccctcaagagtcgagtcaccatatcagtagacacgtccaagaaccagttctccctgaagctgagctctgtgaccgccgcagacacggccgtgtattactgt

SEQ ID NO: 5268 - DNA, 114 bp, synthetic construct
  misc_feature 1..114: note = Synthetic construct
  source 1..114: mol_type = other DNA
aactacaacccctccctcaagagtcgagtcaccatatcagtagacacgtccaagaaccagttctccctgaagctgagctctgtgaccgctgcggacacggccgtgtattactgt

SEQ ID NO: 5269 - DNA, 114 bp, synthetic construct
  misc_feature 1..114: note = Synthetic construct
  source 1..114: mol_type = other DNA
gactacaacccctccctcaagagtcgagtcaccatatcagtagacacgtccaagaaccagttctccctgaagctgagctctgtgaccgctgcggacacggccgtgtattactgt

SEQ ID NO: 5270 - DNA, 114 bp, synthetic construct
  misc_feature 1..114: note = Synthetic construct
  source 1..114: mol_type = other DNA
aactataacccctccctcaagagtcgagtcaccatatcagtagacacgtccaagaaccagttctccctgaagctgagctctgtgaccgctgcggacacggccgtgtattactgt

SEQ ID NO: 5271 - DNA, 114 bp, synthetic construct
  misc_feature 1..114: note = Synthetic construct
  source 1..114: mol_type = other DNA
aactacaacccctccctcaagaatcgattcaccatatcagtagacacgtccaagaaccagttctccctgaaggtgacctctgtgaccgccgcagacacggccgtgtattactgt

SEQ ID NO: 5272 - DNA, 114 bp, synthetic construct
  misc_feature 1..114: note = Synthetic construct
  source 1..114: mol_type = other DNA
aagtacaacccctccctcaagagtcgagtcaccatatcagtagacacgtccaagaaccagttctccctgattctgagctctgtgaccgctgcggacacggccgtgtattattgt

SEQ ID NO: 5273 - DNA, 114 bp, synthetic construct
  misc_feature 1..114: note = Synthetic construct
  source 1..114: mol_type = other DNA
aactacaacccctccctcaagagtcgagtcaccatttcagtagacacgtccaaaaaccagttctccctgaggctgacctctgtgaccgctgcggacacggccgtgtattattgt

SEQ ID NO: 5274 - DNA, 114 bp, synthetic construct
  misc_feature 1..114: note = Synthetic construct
  source 1..114: mol_type = other DNA
aactacaatccctccctcaagagtcgagtcaccatatcagtagacatgtccaagaaccagttctccctgaagatgagctctgtgaccgccgaagacacggccgtgtattattgt

SEQ ID NO: 5275 - DNA, 114 bp, synthetic construct
  misc_feature 1..114: note = Synthetic construct
  source 1..114: mol_type = other DNA
gaccacaacccctccctcaagaggggagtcaccatatcagtggacacgtccaagaaccagttctccttgaggctgacttctgtgaccgccgcagacacggccgtctattactgt

SEQ ID NO: 5276 - DNA, 114 bp, synthetic construct
  misc_feature 1..114: note = Synthetic construct
  source 1..114: mol_type = other DNA
aactacaacccctccctcaagagtcgagtcaccatatcagtagacacgtccaagaaccagttctccctgaggctgacctctgtgaccgccgcagacacggccgtgtattactgt

SEQ ID NO: 5277 - DNA, 114 bp, synthetic construct
  misc_feature 1..114: note = Synthetic construct
  source 1..114: mol_type = other DNA
aactacaacccctccctcaagagtcgagtcaccatatcaatagacacgtccaagaaccagttctccctgaagatgagctctgtgaccgccgcagacacggccgtgtattactgt

SEQ ID NO: 5278 - DNA, 114 bp, synthetic construct
  misc_feature 1..114: note = Synthetic construct
  source 1..114: mol_type = other DNA
aactacaacccctccctcaagagtcgagtcaccatatcagtagacacgtccaagaaccacttctccctgaagctgagctctgtgaccgccgcagacacggccgtctattactgt

SEQ ID NO: 5279 - DNA, 114 bp, synthetic construct
  misc_feature 1..114: note = Synthetic construct
  source 1..114: mol_type = other DNA
aactacaacccctccctcaagagtcgagtcaccatgtcagtagacacgtccaagaaccagttctccctgaagctgagctctgtgaccgccgcggacacggccgtgtatttctgt

SEQ ID NO: 5280 - DNA, 114 bp, synthetic construct
  misc_feature 1..114: note = Synthetic construct
  source 1..114: mol_type = other DNA
gactacaacccctccctttcaaatcgagtcaccatgtcggtggacacgtccaagaatcagttctccctgacggtggactctgtgaccgcagcagacacggccgtctatttctgt

SEQ ID NO: 5281 - DNA, 114 bp, synthetic construct
  misc_feature 1..114: note = Synthetic construct
  source 1..114: mol_type = other DNA
aactacaacccctccctcaagagtcgagtcaccatatcagtagacacgtccaacaataagttctccctgaagctgagctctgtgaccgctgcggacacggccgtttattattgt

SEQ ID NO: 5282 - DNA, 114 bp, synthetic construct
  misc_feature 1..114: note = Synthetic construct
  source 1..114: mol_type = other DNA
aactacaacccctccctcaagagtcgagtcaccatttcagtggactcgtccaagagccagttgtccctgaggctgagctctgtgaccgctgaggacacggccatatattactgt

SEQ ID NO: 5283 - DNA, 114 bp, synthetic construct
  misc_feature 1..114: note = Synthetic construct
  source 1..114: mol_type = other DNA
acctacaacccctccctcaagagtcgagtcaccatctcaatagacacgtccaagaatcagttctccctgaacctggggtctgtgaccgccgcggacagggccgtgtattattgt

SEQ ID NO: 5284 - DNA, 114 bp, synthetic construct
  misc_feature 1..114: note = Synthetic construct
  source 1..114: mol_type = other DNA
aactacaacccgtccctcgagggtcgcgtctccctttcaatagacatgtcaaagaaacagtcgtcactaaaactgacctctgtgaccgccgcggacacggctatttattattgt

SEQ ID NO: 5285 - DNA, 114 bp, synthetic construct
  misc_feature 1..114: note = Synthetic construct
  source 1..114: mol_type = other DNA
aattacaacccctccctcaagagtcgagtcaccatatcagtagacacgtccaagaaccagttctccctgaatatgagctctgtttccgccgcagacacggccgtttattattgt

SEQ ID NO: 5286 - DNA, 114 bp, synthetic construct
  misc_feature 1..114: note = Synthetic construct
  source 1..114: mol_type = other DNA
aagtacaacccctccctcaagggtcgagtcaccatatcatcagacatgtccaagaaccagttctccctcaaactgacctctctgaccgctgcggacacggccatctattactgt

SEQ ID NO: 5287 - DNA, 114 bp, synthetic construct
  misc_feature 1..114: note = Synthetic construct
  source 1..114: mol_type = other DNA
agatacaacccgtccctcaagagtcgggtcaccatatccgttgacacgtccaagaaccacttctccctgaacctgacctctgtgaccgccgcagacacggctgtatattattgt

SEQ ID NO: 5288 - DNA, 114 bp, synthetic construct
  misc_feature 1..114: note = Synthetic construct
  source 1..114: mol_type = other DNA
aactacaacccgtccctcacgagtcgactcaccatatcaattgacacgtccgagaatgaatcttccttgaggctgagctctgtgaccgccgcggacacgggtgtatatttctgt

SEQ ID NO: 5289 - DNA, 114 bp, synthetic construct
  misc_feature 1..114: note = Synthetic construct
  source 1..114: mol_type = other DNA
aactacaacccgtccctcaagagtcgagtcagtatatcagtagacacgtccaagaaccagttttccctgaagttgaactctgtgaccgccgcggacacggctgtgtatttctgt

SEQ ID NO: 5290 - DNA, 114 bp, synthetic construct
  misc_feature 1..114: note = Synthetic construct
  source 1..114: mol_type = other DNA
aattacaacccgtccctcaaaagtcgagtcaccatatcaggagacacgtccaagaaccaattctccctgaagatgaactctgtgaccgccgcggacacggctgtgtattattgt

SEQ ID NO: 5291 - DNA, 114 bp, synthetic construct
  misc_feature 1..114: note = Synthetic construct
  source 1..114: mol_type = other DNA
aactacaacccgtccctcaagagtcgagtcaccatatcagtagacacgtccaagaaccagttctccctgaacctgacctccgtgaccgccgcggacacggctgtttattattgt

SEQ ID NO: 5292 - DNA, 114 bp, synthetic construct
  misc_feature 1..114: note = Synthetic construct
  source 1..114: mol_type = other DNA
gactccaacccgtccctccagagtcgagtttccatttcagttgacacgtccaagaatcaattctccctcactctcacctctctaaccgccgcggacacggccgtgtatttttgt

SEQ ID NO: 5293 - DNA, 114 bp, synthetic construct
  misc_feature 1..114: note = Synthetic construct
  source 1..114: mol_type = other DNA
aattacaacccctccctcaagggtcgagccaccatatcagtagactcgtccaagaaccagttgtccctgaagctgaggtctgtgaccgccgcagacacggccacatatcactgt

SEQ ID NO: 5294 - DNA, 114 bp, synthetic construct
  misc_feature 1..114: note = Synthetic construct
  source 1..114: mol_type = other DNA
agctaccacccctccctcaagagtcgaatcaccatgtccgtagacacgtccaagaaccaggtctccctgaagctgaggtctgttaccgccgctgacacggccgtctattactgt

SEQ ID NO: 5295 - DNA, 114 bp, synthetic construct
  misc_feature 1..114: note = Synthetic construct
  source 1..114: mol_type = other DNA
agtgacaacccgtccctccagagtcgagtcgccatttccgtggacccgtacaagcagcagttctccctgagactgacgtctctgtccgccgcggacacggctgtctactactgt

SEQ ID NO: 5296 - DNA, 114 bp, synthetic construct
  misc_feature 1..114: note = Synthetic construct
  source 1..114: mol_type = other DNA
acctccaatccctccctcaggagtcgagtcaccatttcgattgacacctctaagaatcaattcttcttgaacatggactctctgagtgctgcagacacggccgtctattactgt

SEQ ID NO: 5297 - DNA, 114 bp, synthetic construct
  misc_feature 1..114: note = Synthetic construct
  source 1..114: mol_type = other DNA
aactacatcccctccctcgaaagccgactctccatatcaatggacacgtcgaagaaccagttttccctgaatctgacctctgtgaccgcggcagactcggccgtatacttttgt

SEQ ID NO: 5298 - DNA, 114 bp, synthetic construct
  misc_feature 1..114: note = Synthetic construct
  source 1..114: mol_type = other DNA
tactacaatccgtccctcaagagtcgtatctcattatttgttgacacgtccaagaggcagatctccctgaaggtcaactctgtgaccgccgcagacacggccgtctattactgt

SEQ ID NO: 5299 - DNA, 114 bp, synthetic construct
  misc_feature 1..114: note = Synthetic construct
  source 1..114: mol_type = other DNA
ctatacaacccgtccctcgagagccgagccaccttgtccgtcgacacgtcccagaatcaggtctccctacaattgacttctatgaccgccgcagacgccgctgtctattactgt

SEQ ID NO: 5300 - DNA, 114 bp, synthetic construct
  misc_feature 1..114: note = Synthetic construct
  source 1..114: mol_type = other DNA
ctcatcaaaccgtccctcaagagtcgactttccatgtccaaagacacgtccaatatccaattctccctgagtctgggctctgtgaccgccacagacacggctttttattattgt

SEQ ID NO: 5301 - DNA, 114 bp, synthetic construct
  misc_feature 1..114: note = Synthetic construct
  source 1..114: mol_type = other DNA
tactacaacccgtccctcgagagtcgggtcaccatatccgtagacacgtccaacaaccagttctccttgaggctgatctctgtgaccgccgcagacacggctgaatattactgt

SEQ ID NO: 5302 - DNA, 114 bp, synthetic construct
  misc_feature 1..114: note = Synthetic construct
  source 1..114: mol_type = other DNA
tacttcaacccgtccctcaagaggcgagtcaccatatccgtcgacacgtccaagaaccagttctccctgaagctgagctctgtgaccgccacagacacggctgtgtattactgt

SEQ ID NO: 5303 - DNA, 114 bp, synthetic construct
  misc_feature 1..114: note = Synthetic construct
  source 1..114: mol_type = other DNA
tacttcaacccgtccctcaagagtcgagtcgccatatccgtggacacttccaggaaccagttctccctgaagctgacctctgtgaccgccgcagacacggctgtgtattactgt

SEQ ID NO: 5304 - DNA, 114 bp, synthetic construct
  misc_feature 1..114: note = Synthetic construct
  source 1..114: mol_type = other DNA
tactacaacccgtccctcaagagtcgagtcaccatatccgtagacacgtccaagaaccagttctccctgaaactgagctctgtgaccgccgcagacacggctgtgtattactgt

SEQ ID NO: 5305 - DNA, 114 bp, synthetic construct
  misc_feature 1..114: note = Synthetic construct
  source 1..114: mol_type = other DNA
tactacaacccgtccctcaagagtcgagtcaccatatccgtagacacgtccaagaaccagttctccctgaagctgagctctgtgaccgccgcagacacggctgtgtattactgt

SEQ ID NO: 5306 - DNA, 114 bp, synthetic construct
  misc_feature 1..114: note = Synthetic construct
  source 1..114: mol_type = other DNA
tactacaacccgtccctcaagagtcgagtcaccatatccgtagacacgtccaagaatcagttctccctgaagctgagctctgtgaccgccgcagacacggctgtgtattactgt

SEQ ID NO: 5307 - DNA, 114 bp, synthetic construct
  misc_feature 1..114: note = Synthetic construct
  source 1..114: mol_type = other DNA
tacttcaatccgtccctccagagtcgagccaccttatccgtagacacgtcccagaaccagttctccctgaggctgagctctgtgaccgccgcagacacggctgtgtattactgt

SEQ ID NO: 5308 - DNA, 114 bp, synthetic construct
  misc_feature 1..114: note = Synthetic construct
  source 1..114: mol_type = other DNA
tactacaacccgtccctcaagagtcgagtcaccatatccgtagacacgtccaagaaccagttctccctgaaactgagttctgtgaccgccgcagacacggctgtgtattactgt

SEQ ID NO: 5309 - DNA, 114 bp, synthetic construct
  misc_feature 1..114: note = Synthetic construct
  source 1..114: mol_type = other DNA
aactacaacccctccctccagagtcgaatcaccatatcagtagacacgtccaacaaccagttctccctgaagttgagctctgtgaccgctgcggacacggccgtgtatttctgt

SEQ ID NO: 5310 - DNA, 114 bp, synthetic construct
  misc_feature 1..114: note = Synthetic construct
  source 1..114: mol_type = other DNA
tcctacaacccgtccctcaagagtcgagtgaccatctccttagacatgtcgaagaaccagttctccctgaagctgacctctgtgaccgccgcagacacggccgtgtattattgt

SEQ ID NO: 5311 - DNA, 114 bp, synthetic construct
  misc_feature 1..114: note = Synthetic construct
  source 1..114: mol_type = other DNA
gactacaggtcgtccctcgagagtcgactcaccatatcattagacacgtccaacaaccgcttctccctgagactgaggtctgtgaccgccgcagacacggccatttattactgt

SEQ ID NO: 5312 - DNA, 114 bp, synthetic construct
  misc_feature 1..114: note = Synthetic construct
  source 1..114: mol_type = other DNA
tactacagtccgtccctcaagagtcgagtcaccatatccgtagacacgtccaagaacgaggtctccctgaagctgagctctgtgaccgccgcagacacggccgtatattattgt

SEQ ID NO: 5313 - DNA, 114 bp, synthetic construct
  misc_feature 1..114: note = Synthetic construct
  source 1..114: mol_type = other DNA
tactacaacccgtccctcaagagtcgagtcaccatatcagtagacatgaccaagaaccagttctccctgaagctgagctctgtgaccgccgcagacacggccgtgtattactgt

SEQ ID NO: 5314 - DNA, 114 bp, synthetic construct
  misc_feature 1..114: note = Synthetic construct
  source 1..114: mol_type = other DNA
tactacaattcgtccctcaagagtcgagtcgccatatcggtggacttgtccaagaaccaactctccctgaacctgcgctctgtgacggccgcagacacggccgtgtattattgt

SEQ ID NO: 5315 - DNA, 114 bp, synthetic construct
  misc_feature 1..114: note = Synthetic construct
  source 1..114: mol_type = other DNA
gactacaacccgtccctcaagagtcgagtctccatatcagtagacacgtccaagaaccagttctccctgaagctgacctctgtgaccgccgcagacacggccgtatatttctgt

SEQ ID NO: 5316 - DNA, 114 bp, synthetic construct
  misc_feature 1..114: note = Synthetic construct
  source 1..114: mol_type = other DNA
tactacaacccgtccctcaagagtcgagtcaccatatccgtagacacgtccaagaaccagttgtccctgaacctgaagtctgtgaccgccgcagacacggccgtgtattactgt

SEQ ID NO: 5317 - DNA, 114 bp, synthetic construct
  misc_feature 1..114: note = Synthetic construct
  source 1..114: mol_type = other DNA
tactacagcccgtccctcaagagtcgagtcaccatatcagtagacacgtccaagaaccagttctccctgaagctgaggtctatgaccgccgcagacacggccgtgtattactgt

SEQ ID NO: 5318 - DNA, 114 bp, synthetic construct
  misc_feature 1..114: note = Synthetic construct
  source 1..114: mol_type = other DNA
tactacaacccgtccctcaagagtcgagtcaccatatcagtagacacgtccaagaaccagttctccctgaagctgagctctgtgaccgccgcagacacggccgtgtattactgt

SEQ ID NO: 5319 - DNA, 114 bp, synthetic construct
  misc_feature 1..114: note = Synthetic construct
  source 1..114: mol_type = other DNA
tactacaacccgtccctcaagagtcgagtcatcatatcagtagacacgtccaagaaccagttctccctgaggctgagctctgtgaccgccgcagactcggccgtgtattactgt

SEQ ID NO: 5320 - DNA, 114 bp, synthetic construct
  misc_feature 1..114: note = Synthetic construct
  source 1..114: mol_type = other DNA
tactacaacccgtccctcaagagtcgagtcaccatatcagttgacacgtccaagaaccagttcttcctgaacctgacttctgcgaccgccgcagacacggccgtgtatttctgt

SEQ ID NO: 5321 - DNA, 114 bp, synthetic construct
  misc_feature 1..114: note = Synthetic construct
  source 1..114: mol_type = other DNA
tactacaacccgtccctcaagagtcgagtcaccatatccgtagacacgtccaagaatcagttttccctgaaactgagctctgtgaccgccgcagacacggccgtgtattactgt

SEQ ID NO: 5322 - DNA, 114 bp, synthetic construct
  misc_feature 1..114: note = Synthetic construct
  source 1..114: mol_type = other DNA
tactataacccgtccctcaagagtcgagtcaccttatcaatggacacctccaagaaccagttctctttgaggttgacctctgtgaccgccgcagacacggccatgtattattgt

SEQ ID NO: 5323 - DNA, 114 bp, synthetic construct
  misc_feature 1..114: note = Synthetic construct
  source 1..114: mol_type = other DNA
cactttaacccgtccctccagagtcgagtgtccatgtcagtagacacgtccaagaacgaattctttctgaacctgaggtctgtcaccgccgccgacacggccgtttattattgt

SEQ ID NO: 5324 - DNA, 114 bp, synthetic construct
  misc_feature 1..114: note = Synthetic construct
  source 1..114: mol_type = other DNA
tactacaacccgtccctgaagagtcgagtcaccatttccctggacacgtccaagaaccagatctccctgaacctgaggtctgtgaccgccgcagacacggccatttattactgt

SEQ ID NO: 5325 - DNA, 114 bp, synthetic construct
  misc_feature 1..114: note = Synthetic construct
  source 1..114: mol_type = other DNA
tattacaacccgtccctcaagagtcgagtctccatatccgtagacacgtccacgaatcacttctccctgaagctgacctctgtgaccgccgcagacacggctgtgtatttctgt

SEQ ID NO: 5326 - DNA, 114 bp, synthetic construct
  misc_feature 1..114: note = Synthetic construct
  source 1..114: mol_type = other DNA
taccagaacccgtccctcaagaggcgagtcaccatatccatggacacgtccagccaccaattctccctggacctgcgctctgtgaccgccgcagattcggccgtttattactgt

SEQ ID NO: 5327 - DNA, 114 bp, synthetic construct
  misc_feature 1..114: note = Synthetic construct
  source 1..114: mol_type = other DNA
tactacaacccgtccctcaagagtcgagtcaccatttcagtggacacgtccaagaaccagttctccctgaagctgagctctgtgaccgccgcagacacggccgtttattattgt

SEQ ID NO: 5328 - DNA, 114 bp, synthetic construct
  misc_feature 1..114: note = Synthetic construct
  source 1..114: mol_type = other DNA
tactacaatccggccttcaagagtcgcgcctccatatctgtggacacgtccaagaacctgttctccctgaatgtgaagtctgcgaccgccgcagacacggccgtgtactattgt

SEQ ID NO: 5329 - DNA, 114 bp, synthetic construct
  misc_feature 1..114: note = Synthetic construct
  source 1..114: mol_type = other DNA
aactacgcacagaagttccagggcagagtcacgattatcgcggacgtgtccacgagcacagcctacctggaactgagcagcctgagatctgaggacacggccgtttattactgc

SEQ ID NO: 5330 - DNA, 114 bp, synthetic construct
  misc_feature 1..114: note = Synthetic construct
  source 1..114: mol_type = other DNA
aattacgcacagaaattcaagggcagagtcatcattaccgcggacgaatccacaaacacagcctacatggagctgaatagtctgacatcagatgacacggccgtctactactgt

SEQ ID NO: 5331 - DNA, 114 bp, synthetic construct
  misc_feature 1..114: note = Synthetic construct
  source 1..114: mol_type = other DNA
aactacgcacagaagttccagggcagagtcaccataagcgcggacgaacgcacgaatacaatctatatggaggtgagcagcctgacatctgaggacacggccgtctatttttgt

SEQ ID NO: 5332 - DNA, 114 bp, synthetic construct
  misc_feature 1..114: note = Synthetic construct
  source 1..114: mol_type = other DNA
aactacgcacagaaattccagggcagagtcacgatcaccagagacgattctaagaccacaatttatatggagttgagcagtctgagatctgaggacacggccgtctattactgt

SEQ ID NO: 5333 - DNA, 114 bp, synthetic construct
  misc_feature 1..114: note = Synthetic construct
  source 1..114: mol_type = other DNA
aactacgcacagggactcgaggacagagtcaccatgaccacagacacaaccacaaagacagcctatctggagttgaggagcctgaaatctgacgacacggccgtctatttctgt

SEQ ID NO: 5334 - DNA, 114 bp, synthetic construct
  misc_feature 1..114: note = Synthetic construct
  source 1..114: mol_type = other DNA
tactacgcagactccgtgaagggccgattcaccatctccagagacgattccaagaacacgctgtatctgcaattgaccagcctgagacctgaagacacggctgtatattactgt

SEQ ID NO: 5335 - DNA, 114 bp, synthetic construct
  misc_feature 1..114: note = Synthetic construct
  source 1..114: mol_type = other DNA
cattacgcagactcagtgaggggccgattctccgtctccagagacaacgccaagaattcagtgtttctgcaaatggacagcctgagagtcgaggacacggctgtttattattgt

SEQ ID NO: 5336 - DNA, 114 bp, synthetic construct
  misc_feature 1..114: note = Synthetic construct
  source 1..114: mol_type = other DNA
ctatatgcagagaagttccagggcagagtcaccatcaccgcagacacgtctacagacacactcttcatggaactgagcaatttgaaatctgacgacacggccgtgtattactgt

SEQ ID NO: 5337 - DNA, 114 bp, synthetic construct; identical to SEQ ID NO: 1792
  misc_feature 1..114: note = Synthetic construct
  source 1..114: mol_type = other DNA

SEQ ID NO: 5338 - DNA, 114 bp, synthetic construct
  misc_feature 1..114: note = Synthetic construct
  source 1..114: mol_type = other DNA
gactatatagactctgtgaagggccgattcaccatttccagggacaaatccaggaactcgctctatctgcaaatggacagcctcaaagtcgaagactcgggtgtctattattgt

SEQ ID NO: 5339 - DNA, 114 bp, synthetic construct
  misc_feature 1..114: note = Synthetic construct
  source 1..114: mol_type = other DNA
cattatgcagactctgtgaagggccgattcaccatctccagagacaacgccaagaactccctctatctggagatgaacagtctgagagtcgaagacacggccttgtattactgc

SEQ ID NO: 5340 - DNA, 114 bp, synthetic construct
  misc_feature 1..114: note = Synthetic construct
  source 1..114: mol_type = other DNA
caatacgcagacgctgtgaggggtcggttcaccatctccagggacaacgccgagaactcactgtatctacaaatgaacagcctgagagccgacgacacggctgtttattattgt

SEQ ID NO: 5341 - DNA, 114 bp, synthetic construct
  misc_feature 1..114: note = Synthetic construct
  source 1..114: mol_type = other DNA
ttctacgcagactccgtgaagggccgattcaccatctccagagacaattccaagaacacactatctctgcaaatggacagcctgagagctgacgacacggccacttatttctgt

SEQ ID NO: 5342 - DNA, 114 bp, synthetic construct
  misc_feature 1..114: note = Synthetic construct
  source 1..114: mol_type = other DNA
tactatgcacagaaatttcagggcagggtcaccatgaccagggacacgtccatcagtgctgcctacatggagttgagcaggctgaaatatgacgacgcggccatttatttctgt

SEQ ID NO: 5343 - DNA, 114 bp, synthetic construct
  misc_feature 1..114: note = Synthetic construct
  source 1..114: mol_type = other DNA
atctacgcacagaagttcctgggcagagtcaccatgaccgaggacacaactgcagacacagcctacatggagctgaccagcctgacatttgcggacacggccgtgtattactgt

SEQ ID NO: 5344 - DNA, 114 bp, synthetic construct
  misc_feature 1..114: note = Synthetic construct
  source 1..114: mol_type = other DNA
ttctacagcccgtctctaaaggacagactctccatctccaaggatactttcattaaccaggtggtccttacaatgaccaatgtggaccctctggacacagccacatattactgt

SEQ ID NO: 5345 - DNA, 114 bp, synthetic construct
  misc_feature 1..114: note = Synthetic construct
  source 1..114: mol_type = other DNA
acctacgcacagaagttcggggggagagtcaccattgacgcggacgaattcacgagcacagccttcatggaactgagcgacctgcgatctgaagacactgccctgtactcctgt

SEQ ID NO: 5346 - DNA, 114 bp, synthetic construct
  misc_feature 1..114: note = Synthetic construct
  source 1..114: mol_type = other DNA
tactatgcagactccgtgaagggccgattcaccatctccagagacaattccaagaacacggtgtatttgcaaatgaacagcctgggagctgacgacacggctgtatatttctgt

SEQ ID NO: 5347 - DNA, 34 bp, synthetic construct; identical to SEQ ID NO: 1794
  misc_feature 1..34: note = Synthetic construct
  source 1..34: mol_type = other DNA

SEQ ID NO: 5348 - DNA, 34 bp, synthetic construct
  misc_feature 1..34: note = Synthetic construct
  source 1..34: mol_type = other DNA
tggggccaagggacactggtcaccgtctcttcag

SEQ ID NO: 5349 - DNA, 33 bp, synthetic construct
  misc_feature 1..33: note = Synthetic construct
  source 1..33: mol_type = other DNA
tggggccaagggaccacggtcaccgtctcctca

SEQ ID NO: 5350 - DNA, 33 bp, synthetic construct
  misc_feature 1..33: note = Synthetic construct
  source 1..33: mol_type = other DNA
tggggcacagggaccacggtcaccgtctccaca

SEQ ID NO: 5351 - DNA, 34 bp, synthetic construct
  misc_feature 1..34: note = Synthetic construct
  source 1..34: mol_type = other DNA
tggggcccgggaacccaggtcaccgtctcctcag

SEQ ID NO: 5352 - DNA, 34 bp, synthetic construct
  misc_feature 1..34: note = Synthetic construct
  source 1..34: mol_type = other DNA
tggggccagggaacccgggtcaccgtctcctcag

SEQ ID NO: 5353 - DNA, 34 bp, synthetic construct; identical to SEQ ID NO: 1793
  misc_feature 1..34: note = Synthetic construct
  source 1..34: mol_type = other DNA

SEQ ID NO: 5354 - DNA, 34 bp, synthetic construct
  misc_feature 1..34: note = Synthetic construct
  source 1..34: mol_type = other DNA
tggggccagggaaccaaggtcaccgtctcctcag

SEQ ID NO: 5355 - DNA, 34 bp, synthetic construct
  misc_feature 1..34: note = Synthetic construct
  source 1..34: mol_type = other DNA
tggggccagggaagcctggtcaccgtctcctcag

SEQ ID NO: 5356 - DNA, 34 bp, synthetic construct
  misc_feature 1..34: note = Synthetic construct
  source 1..34: mol_type = other DNA
tggggccaagggacagtggtcaccgtctcttcag

SEQ ID NO: 5357 - DNA, 34 bp, synthetic construct
  misc_feature 1..34: note = Synthetic construct
  source 1..34: mol_type = other DNA
tggggccagggaaccttggtcaccgtctcctcag

SEQ ID NO: 5358 - DNA, 34 bp, synthetic construct
  misc_feature 1..34: note = Synthetic construct
  source 1..34: mol_type = other DNA
tgggggcagggaaccctggtcaccgtctcctcag

SEQ ID NO: 5359 - DNA, 34 bp, synthetic construct
  misc_feature 1..34: note = Synthetic construct
  source 1..34: mol_type = other DNA
tggggccagggaacccaggtcaccgtctcctcag

SEQ ID NO: 5360 - DNA, 34 bp, synthetic construct
  misc_feature 1..34: note = Synthetic construct
  source 1..34: mol_type = other DNA
tggggccagggatccctggtcaccgtctcctcag

SEQ ID NO: 5361 - DNA, 34 bp, synthetic construct
  misc_feature 1..34: note = Synthetic construct
  source 1..34: mol_type = other DNA
tggggccagggaactctggtcaccgtctcctcag

SEQ ID NO: 5362 - DNA, 34 bp, synthetic construct
  misc_feature 1..34: note = Synthetic construct
  source 1..34: mol_type = other DNA
tggggccaagggacaatggtcaccgtctcttcag

SEQ ID NO: 5363 - DNA, 33 bp, synthetic construct
  misc_feature 1..33: note = Synthetic construct
  source 1..33: mol_type = other DNA
tggggcaaagggaccacggtcactgtctcctca

SEQ ID NO: 5364 - DNA, 34 bp, synthetic construct
  misc_feature 1..34: note = Synthetic construct
  source 1..34: mol_type = other DNA
tggggccaggggacaacactcaccgtctcttcag

SEQ ID NO: 5365 - DNA, 34 bp, synthetic construct
  misc_feature 1..34: note = Synthetic construct
  source 1..34: mol_type = other DNA
tggggccagggaaccctggtcacagtctcctcag

SEQ ID NO: 5366 - DNA, 34 bp, synthetic construct
  misc_feature 1..34: note = Synthetic construct
  source 1..34: mol_type = other DNA
tggggccaggggacactggtcaccgtctcttcag

SEQ ID NO: 5367 - DNA, 33 bp, synthetic construct
  misc_feature 1..33: note = Synthetic construct
  source 1..33: mol_type = other DNA
tggggcaaagggaccacggtcaccgtctcctca

SEQ ID NO: 5368 - DNA, 34 bp, synthetic construct
  misc_feature 1..34: note = Synthetic construct
  source 1..34: mol_type = other DNA
tggggccagggcaccctggtcaccgtctcctcag

SEQ ID NO: 5369 - DNA, 33 bp, synthetic construct
  misc_feature 1..33: note = Synthetic construct
  source 1..33: mol_type = other DNA
tggggcaatgggaccacggtcaccgtctcctca

SEQ ID NO: 5370 - DNA, 34 bp, synthetic construct; identical to SEQ ID NO: 1796
  misc_feature 1..34: note = Synthetic construct
  source 1..34: mol_type = other DNA

SEQ ID NO: 5371 - DNA, 34 bp, synthetic construct
  misc_feature 1..34: note = Synthetic construct
  source 1..34: mol_type = other DNA
tggggccgagggacaatggtcaccgtctcttcag

SEQ ID NO: 5372 - DNA, 34 bp, synthetic construct
  misc_feature 1..34: note = Synthetic construct
  source 1..34: mol_type = other DNA
tggggccaagggacgatggtcaccgtctcctcag

SEQ ID NO: 5373 - DNA, 34 bp, synthetic construct
  misc_feature 1..34: note = Synthetic construct
  source 1..34: mol_type = other DNA
tggggccaggggactctggtgaccgtctcctcag

SEQ ID NO: 5374 - DNA, 34 bp, synthetic construct
  misc_feature 1..34: note = Synthetic construct
  source 1..34: mol_type = other DNA
tggggccagggaaccctggtcatcgtctcctcag

SEQ ID NO: 5375 - DNA, 33 bp, synthetic construct
  misc_feature 1..33: note = Synthetic construct
  source 1..33: mol_type = other DNA
tggggcaaagggaccacagtcaccgtctcctca

SEQ ID NO: 5376 - DNA, 34 bp, synthetic construct
  misc_feature 1..34: note = Synthetic construct
  source 1..34: mol_type = other DNA
tggggccagggaaccctggtcagtgtctcctcag

SEQ ID NO: 5377 - DNA, 34 bp, synthetic construct
  misc_feature 1..34: note = Synthetic construct
  source 1..34: mol_type = other DNA
tggggcaaagggaccacggtcaccgtctcctcag

SEQ ID NO: 5378 - DNA, 34 bp, synthetic construct
  misc_feature 1..34: note = Synthetic construct
  source 1..34: mol_type = other DNA
tggggccagggaaccccggtcaccgtctcctcag

SEQ ID NO: 5379 - DNA, 34 bp, synthetic construct
  misc_feature 1..34: note = Synthetic construct
  source 1..34: mol_type = other DNA
tggggccaagggacagtagtcaccgtctcttcag

SEQ ID NO: 5380 - DNA, 34 bp, synthetic construct
  misc_feature 1..34: note = Synthetic construct
  source 1..34: mol_type = other DNA
tggggacagggaaccctggtcgccgtctcctcag

SEQ ID NO: 5381 - DNA, 33 bp, synthetic construct
  misc_feature 1..33: note = Synthetic construct
  source 1..33: mol_type = other DNA
tggggcagcgggaccacggtaatcgtctcctcg

SEQ ID NO: 5382 - DNA, 34 bp, synthetic construct
  misc_feature 1..34: note = Synthetic construct
  source 1..34: mol_type = other DNA
tggggccaagggacattgctcaccgtctcttcag

SEQ ID NO: 5383 - DNA, 33 bp, synthetic construct
  misc_feature 1..33: note = Synthetic construct
  source 1..33: mol_type = other DNA
tggggcaagggggcctcggtcaccgtctcctca

SEQ ID NO: 5384 - DNA, 34 bp, synthetic construct
  misc_feature 1..34: note = Synthetic construct
  source 1..34: mol_type = other DNA
tggggccgtgggaccctggtcactgtctcctcag

SEQ ID NO: 5385 - DNA, 34 bp, synthetic construct
  misc_feature 1..34: note = Synthetic construct
  source 1..34: mol_type = other DNA
tggggccttggcacccaggtcactgtcgcctcag

SEQ ID NO: 5386 - DNA, 34 bp, synthetic construct
  misc_feature 1..34: note = Synthetic construct
  source 1..34: mol_type = other DNA
tggggccagggaatatcggtcaccgtctcctccg

SEQ ID NO: 5387 - DNA, 33 bp, synthetic construct
  misc_feature 1..33: note = Synthetic construct
  source 1..33: mol_type = other DNA
tggggcaaagggaccacggtctccgtctcctca

SEQ ID NO: 5388 - DNA, 34 bp, synthetic construct
  misc_feature 1..34: note = Synthetic construct
  source 1..34: mol_type = other DNA
tggggcctggggacaacggtcatcgtctcttcag

SEQ ID NO: 5389 - DNA, 34 bp, synthetic construct
  misc_feature 1..34: note = Synthetic construct
  source 1..34: mol_type = other DNA
tggggccagggaaccctggtctccgtctccacag

SEQ ID NO: 5390 - DNA, 34 bp, synthetic construct
  misc_feature 1..34: note = Synthetic construct
  source 1..34: mol_type = other DNA
tggggccagggaaccctggtcaccgtctcgtcag

SEQ ID NO: 5391 - DNA, 34 bp, synthetic construct
  misc_feature 1..34: note = Synthetic construct
  source 1..34: mol_type = other DNA
tggggccagggaaccctggtcaccgtctcctcat

SEQ ID NO: 5392 - DNA, 34 bp, synthetic construct
  misc_feature 1..34: note = Synthetic construct
  source 1..34: mol_type = other DNA
tggggccagggtaccctggtcaccgtctcctcag

SEQ ID NO: 5393 - DNA, 34 bp, synthetic construct
  misc_feature 1..34: note = Synthetic construct
  source 1..34: mol_type = other DNA
tggggccagggcaccctggtcaccgtctcgtcag

SEQ ID NO: 5394 - DNA, 34 bp, synthetic construct
  misc_feature 1..34: note = Synthetic construct
  source 1..34: mol_type = other DNA
tggggccaggggacccaggtcaccgtctcctctg

SEQ ID NO: 5395 - DNA, 34 bp, synthetic construct
  misc_feature 1..34: note = Synthetic construct
  source 1..34: mol_type = other DNA
tggggccaagggactatggtcaccgtctcttcag

SEQ ID NO: 5396 - DNA, 34 bp, synthetic construct
  misc_feature 1..34: note = Synthetic construct
  source 1..34: mol_type = other DNA
tggggccagggaaccctggtctccgtctcctcag

SEQ ID NO: 5397 - DNA, 34 bp, synthetic construct
  misc_feature 1..34: note = Synthetic construct
  source 1..34: mol_type = other DNA
tggggccagggaaccctggtcaccgtctcctcaa

SEQ ID NO: 5398 - DNA, 34 bp, synthetic construct
  misc_feature 1..34: note = Synthetic construct
  source 1..34: mol_type = other DNA
tggggccacgggacagtggtcaccgtctcctcag

SEQ ID NO: 5399 - DNA, 34 bp, synthetic construct
  misc_feature 1..34: note = Synthetic construct
  source 1..34: mol_type = other DNA
tggggccaagggacactggtcaccgtctcttcga

SEQ ID NO: 5400 - DNA, 34 bp, synthetic construct
  misc_feature 1..34: note = Synthetic construct
  source 1..34: mol_type = other DNA
tggggccagggaacccaggtcatcgtctcctcag

SEQ ID NO: 5401 - DNA, 34 bp, synthetic construct
  misc_feature 1..34: note = Synthetic construct
  source 1..34: mol_type = other DNA
tggggccagggaaccctggtcactgtctcttccg

SEQ ID NO: 5402 - DNA, 34 bp, synthetic construct
  misc_feature 1..34: note = Synthetic construct
  source 1..34: mol_type = other DNA
tggggccaagggacaagggtcaccgtctcttcag

SEQ ID NO: 5403 - DNA, 33 bp, synthetic construct
  misc_feature 1..33: note = Synthetic construct
  source 1..33: mol_type = other DNA
tggggcaaagggacaacggtcaccgtctcctca

SEQ ID NO: 5404 - DNA, 34 bp, synthetic construct
  misc_feature 1..34: note = Synthetic construct
  source 1..34: mol_type = other DNA
tggggccagggaaccctggtcaccgtctccccag

SEQ ID NO: 5405 - DNA, 34 bp, synthetic construct
  misc_feature 1..34: note = Synthetic construct
  source 1..34: mol_type = other DNA
tggggccgtggcaccctgatcactgtctcctcag

SEQ ID NO: 5406 - DNA, 34 bp, synthetic construct
  misc_feature 1..34: note = Synthetic construct
  source 1..34: mol_type = other DNA
tggggccaagggacgatggtcaccgtctcttcag

SEQ ID NO: 5407 - DNA, 34 bp, synthetic construct
  misc_feature 1..34: note = Synthetic construct
  source 1..34: mol_type = other DNA
tggggccagggaaccctggtcaccgtctcctcac

SEQ ID NO: 5408 - DNA, 34 bp, synthetic construct
  misc_feature 1..34: note = Synthetic construct
  source 1..34: mol_type = other DNA
tggggccaagggacaagggtcatcgtctcttcag

SEQ ID NO: 5409 - DNA, 34 bp, synthetic construct
  misc_feature 1..34: note = Synthetic construct
  source 1..34: mol_type = other DNA
tggggccagggacttctggtcaccgtctcctcag

SEQ ID NO: 5410 - DNA, 34 bp, synthetic construct
  misc_feature 1..34: note = Synthetic construct
  source 1..34: mol_type = other DNA
tggggccaagggacaaaggtcaccgtctcttcag

SEQ ID NO: 5411 - DNA, 34 bp, synthetic construct
  misc_feature 1..34: note = Synthetic construct
  source 1..34: mol_type = other DNA
tggggccaagggacaatggtcaacgtctcttcag

SEQ ID NO: 5412 - DNA, 33 bp, synthetic construct
  misc_feature 1..33: note = Synthetic construct
  source 1..33: mol_type = other DNA
tggggcggagggaccacggtcaccgtctcttca

SEQ ID NO: 5413 - DNA, 34 bp, synthetic construct
  misc_feature 1..34: note = Synthetic construct
  source 1..34: mol_type = other DNA
tggggcctgggaaccctggtcaccgtctcctcag

SEQ ID NO: 5414 - DNA, 33 bp, synthetic construct
  misc_feature 1..33: note = Synthetic construct
  source 1..33: mol_type = other DNA
tggggcagagggaccacggtcaccgtctcccca

SEQ ID NO: 5415 - DNA, 34 bp, synthetic construct
  misc_feature 1..34: note = Synthetic construct
  source 1..34: mol_type = other DNA
tggggccggggaaccgtggtcaccgtctcctcag

SEQ ID NO: 5416 - DNA, 34 bp, synthetic construct
  misc_feature 1..34: note = Synthetic construct
  source 1..34: mol_type = other DNA
tggggccagggaaccctcgtcaccgtctcctcag

SEQ ID NO: 5417 - DNA, 34 bp, synthetic construct
  misc_feature 1..34: note = Synthetic construct
  source 1..34: mol_type = other DNA
tggggccagggcaccctggtcgtcgtctcctcag

SEQ ID NO: 5418 - DNA, 33 bp, synthetic construct
  misc_feature 1..33: note = Synthetic construct
  source 1..33: mol_type = other DNA
tggggcaaagggatcacggtcaccgtctcctca

SEQ ID NO: 5419 - DNA, 34 bp, synthetic construct
  misc_feature 1..34: note = Synthetic construct
  source 1..34: mol_type = other DNA
tggggccaaggaacaatggtcaccgtctcttcag

SEQ ID NO: 5420 - DNA, 33 bp, synthetic construct
  misc_feature 1..33: note = Synthetic construct
  source 1..33: mol_type = other DNA
tggggcaaagggaccacggtcaccgtctcttca

SEQ ID NO: 5421 - DNA, 34 bp, synthetic construct
  misc_feature 1..34: note = Synthetic construct
  source 1..34: mol_type = other DNA
tggggccagggaacccgcgtcaccgtctcctcag

SEQ ID NO: 5422 - DNA, 34 bp, synthetic construct
  misc_feature 1..34: note = Synthetic construct
  source 1..34: mol_type = other DNA
tggggccaagggacaatggtcaccgtctccttag

SEQ ID NO: 5423 - DNA, 34 bp, synthetic construct
  misc_feature 1..34: note = Synthetic construct
  source 1..34: mol_type = other DNA
tggggccaggggacaaaggtcaccgtctcttcag

SEQ ID NO: 5424 - DNA, 33 bp, synthetic construct
  misc_feature 1..33: note = Synthetic construct
  source 1..33: mol_type = other DNA
tggggcaaagggactacggtcaccgtctcctca

SEQ ID NO: 5425 - DNA, 33 bp, synthetic construct
  misc_feature 1..33: note = Synthetic construct
  source 1..33: mol_type = other DNA
tggggcaaagggaccacggtcaccgtctcctct

SEQ ID NO: 5426 - DNA, 34 bp, synthetic construct
  misc_feature 1..34: note = Synthetic construct
  source 1..34: mol_type = other DNA
tggggccaaggaaccctggtcaccgtctcctcag

SEQ ID NO: 5427 - DNA, 33 bp, synthetic construct
  misc_feature 1..33: note = Synthetic construct
  source 1..33: mol_type = other DNA
tggggcaacgggaccacgatcactgtctcctca

SEQ ID NO: 5428 - DNA, 34 bp, synthetic construct
  misc_feature 1..34: note = Synthetic construct
  source 1..34: mol_type = other DNA
tggggccaagggacactggtcaccgtcgcctcag

SEQ ID NO: 5429 - DNA, 34 bp, synthetic construct
  misc_feature 1..34: note = Synthetic construct
  source 1..34: mol_type = other DNA
tggggccagggaaccctggtcactgtctcgtcag

SEQ ID NO: 5430 - DNA, 34 bp, synthetic construct
  misc_feature 1..34: note = Synthetic construct
  source 1..34: mol_type = other DNA
tggggccaggggaccctggtcaccgtcccctcag

SEQ ID NO: 5431 - DNA, 34 bp, synthetic construct
  misc_feature 1..34: note = Synthetic construct
  source 1..34: mol_type = other DNA
tggggccagggaacctgggtcaccgtctcctcag

SEQ ID NO: 5432 - DNA, 34 bp, synthetic construct
  misc_feature 1..34: note = Synthetic construct
  source 1..34: mol_type = other DNA
tggggccaagggacaatggtcatcgtctcttcag

SEQ ID NO: 5433 - DNA, 34 bp, synthetic construct
  misc_feature 1..34: note = Synthetic construct
  source 1..34: mol_type = other DNA
tggggccagggagtcctggtcaccgtctcctcag

SEQ ID NO: 5434 - DNA, 33 bp, synthetic construct
  misc_feature 1..33: note = Synthetic construct
  source 1..33: mol_type = other DNA
tggggtaaagggaccacggtcaccgtctcctca

SEQ ID NO: 5435 - DNA, 33 bp, synthetic construct
  misc_feature 1..33: note = Synthetic construct
  source 1..33: mol_type = other DNA
tggggcaaagggaccgcggtcaccgtctcctca

SEQ ID NO: 5436 - DNA, 34 bp, synthetic construct
  misc_feature 1..34: note = Synthetic construct
  source 1..34: mol_type = other DNA
tggggccagggaacccaggtcaccgtctccgcag

SEQ ID NO: 5437 - DNA, 34 bp, synthetic construct
  misc_feature 1..34: note = Synthetic construct
  source 1..34: mol_type = other DNA
tggggcacaggcattatggtcacagtctcctcag

SEQ ID NO: 5438 - DNA, 33 bp, synthetic construct
  misc_feature 1..33: note = Synthetic construct
  source 1..33: mol_type = other DNA
tggggtaaagggaccacagtcaccgtctcctca

SEQ ID NO: 5439 - DNA, 33 bp, synthetic construct
  misc_feature 1..33: note = Synthetic construct
  source 1..33: mol_type = other DNA
tggggcaaggggaccacggtcttcgtctcctca

SEQ ID NO: 5440 - DNA, 34 bp, synthetic construct
  misc_feature 1..34: note = Synthetic construct
  source 1..34: mol_type = other DNA
tggggccaagggacattggtcaccgtctcttcag

SEQ ID NO: 5441 - DNA, 34 bp, synthetic construct
  misc_feature 1..34: note = Synthetic construct
  source 1..34: mol_type = other DNA
tggggccagggaacccgggtcaccgtctcctctg

SEQ ID NO: 5442 - DNA, 34 bp, synthetic construct
  misc_feature 1..34: note = Synthetic construct
  source 1..34: mol_type = other DNA
tggggcccgggatccctggtcaccgtctcctcag

SEQ ID NO: 5443 - DNA, 25 bp, synthetic construct
  misc_feature 1..25: note = Synthetic construct
  source 1..25: mol_type = other DNA
tggggccagggaaccttggtcaccg

SEQ ID NO: 5444 - DNA, 34 bp, synthetic construct
  misc_feature 1..34: note = Synthetic construct
  source 1..34: mol_type = other DNA
tggggccagggagccctggtcaccgtctcctcag

SEQ ID NO: 5445 - DNA, 34 bp, synthetic construct
  misc_feature 1..34: note = Synthetic construct
  source 1..34: mol_type = other DNA
tggggccagggaactttggtcaccgtctcctcag

SEQ ID NO: 5446 - DNA, 34 bp, synthetic construct
  misc_feature 1..34: note = Synthetic construct
  source 1..34: mol_type = other DNA
tggggccgtggcaccctggtcactgtctcctcag

SEQ ID NO: 5447 - DNA, 34 bp, synthetic construct
  misc_feature 1..34: note = Synthetic construct
  source 1..34: mol_type = other DNA
gtgggccagggaaccctggtcaccgtctcctcag

SEQ ID NO: 5448 - DNA, 34 bp, synthetic construct
  misc_feature 1..34: note = Synthetic construct
  source 1..34: mol_type = other DNA
tggggccaagggacaatggtcaccgtctcctcag

SEQ ID NO: 5449 - DNA, 34 bp, synthetic construct
  misc_feature 1..34: note = Synthetic construct
  source 1..34: mol_type = other DNA
tggggccagggaatcctggtcaccgtcgcctcag

SEQ ID NO: 5450 - DNA, 34 bp, synthetic construct
  misc_feature 1..34: note = Synthetic construct
  source 1..34: mol_type = other DNA
tggggccagggcaccctggtcaccgtctcctctg

SEQ ID NO: 5451 - DNA, 34 bp, synthetic construct; identical to SEQ ID NO: 1795
  misc_feature 1..34: note = Synthetic construct
  source 1..34: mol_type = other DNA

SEQ ID NO: 5452 - DNA, 34 bp, synthetic construct
  misc_feature 1..34: note = Synthetic construct
  source 1..34: mol_type = other DNA
tgggggcagggagtcctggtcaccgtctcctcag

SEQ ID NO: 5453 - DNA, 34 bp, synthetic construct
  misc_feature 1..34: note = Synthetic construct
  source 1..34: mol_type = other DNA
tggggccaggggacaatggtcatcgtctcttcag

SEQ ID NO: 5454 - DNA, 34 bp, synthetic construct
  misc_feature 1..34: note = Synthetic construct
  source 1..34: mol_type = other DNA
tggggccagggagccctggtcaccgtctcctcac

SEQ ID NO: 5455 - DNA, 33 bp, synthetic construct
  misc_feature 1..33: note = Synthetic construct
  source 1..33: mol_type = other DNA
tggggccgagggaccaccgtcaccgtctcctca

SEQ ID NO: 5456 - DNA, 34 bp, synthetic construct
  misc_feature 1..34: note = Synthetic construct
  source 1..34: mol_type = other DNA
tggggccagggcaccctggtcatcgtctcctcag

SEQ ID NO: 5457 - DNA, 34 bp, synthetic construct
  misc_feature 1..34: note = Synthetic construct
  source 1..34: mol_type = other DNA
tggggcccgggaaccctggtcaccgtctcctcag

SEQ ID NO: 5458 - DNA, 34 bp, synthetic construct
  misc_feature 1..34: note = Synthetic construct
  source 1..34: mol_type = other DNA
tggggccaagggacaacggtcaccgtctcttcag

SEQ ID NO: 5459 - DNA, 34 bp, synthetic construct
  misc_feature 1..34: note = Synthetic construct
  source 1..34: mol_type = other DNA
tggggccagggaaccctggccaccgtctcctcag

SEQ ID NO: 5460 - DNA, 34 bp, synthetic construct
  misc_feature 1..34: note = Synthetic construct
  source 1..34: mol_type = other DNA
tggggccagggagcccaggtcaccgtctcctcag

SEQ ID NO: 5461 - DNA, 34 bp, synthetic construct
  misc_feature 1..34: note = Synthetic construct
  source 1..34: mol_type = other DNA
tggggccagggagcccaagtcaccgtctcctcag

SEQ ID NO: 5462 - DNA, 34 bp, synthetic construct
  misc_feature 1..34: note = Synthetic construct
  source 1..34: mol_type = other DNA
tggggacagggaacccgcgtcaccgtctcctcag

SEQ ID NO: 5463 - DNA, 34 bp, synthetic construct
  misc_feature 1..34: note = Synthetic construct
  source 1..34: mol_type = other DNA
tggggccagggagccctggtcaccgtcgcctcag

SEQ ID NO: 5464 - DNA, 34 bp, synthetic construct
  misc_feature 1..34: note = Synthetic construct
  source 1..34: mol_type = other DNA
tggggccagggaaccctggtcaccgtctccacgg

SEQ ID NO: 5465 - DNA, 34 bp, synthetic construct
  misc_feature 1..34: note = Synthetic construct
  source 1..34: mol_type = other DNA
tggggacagggaaccctggtcgccgtctcctccg

SEQ ID NO: 5466 - DNA, 34 bp, synthetic construct
  misc_feature 1..34: note = Synthetic construct
  source 1..34: mol_type = other DNA
tggggccagggaacccaggtcaccgtctcctcgg

SEQ ID NO: 5467 - DNA, 34 bp, synthetic construct
  misc_feature 1..34: note = Synthetic construct
  source 1..34: mol_type = other DNA
tggggccgggggacagtggtcaccgtctcctcag

SEQ ID NO: 5468 - DNA, 34 bp, synthetic construct
  misc_feature 1..34: note = Synthetic construct
  source 1..34: mol_type = other DNA
tggggccagggaaccctggtcaccgtctcctctg

SEQ ID NO: 5469 - DNA, 33 bp, synthetic construct
  misc_feature 1..33: note = Synthetic construct
  source 1..33: mol_type = other DNA
tggggcaaggggaccgcggtcacggtctcctca

SEQ ID NO: 5470 - DNA, 34 bp, synthetic construct
  misc_feature 1..34: note = Synthetic construct
  source 1..34: mol_type = other DNA
tggggccaaggggcactggtcaccgtctcctcag

SEQ ID NO: 5471 - DNA, 34 bp, synthetic construct
  misc_feature 1..34: note = Synthetic construct
  source 1..34: mol_type = other DNA
tggggccagggaaccctggtcaccgtcacctcag

SEQ ID NO: 5472 - DNA, 34 bp, synthetic construct
  misc_feature 1..34: note = Synthetic construct
  source 1..34: mol_type = other DNA
tggggccagggaaccgtggtcaccgtctcttcag

SEQ ID NO: 5473 - DNA, 34 bp, synthetic construct
  misc_feature 1..34: note = Synthetic construct
  source 1..34: mol_type = other DNA
tggggccagggaaccctggtccccgtctcctcag

SEQ ID NO: 5474 - DNA, 34 bp, synthetic construct
  misc_feature 1..34: note = Synthetic construct
  source 1..34: mol_type = other DNA
tggggccagggaaccgtggtcaccgtctcctcag

SEQ ID NO: 5475 - DNA, 34 bp, synthetic construct
  misc_feature 1..34: note = Synthetic construct
  source 1..34: mol_type = other DNA
tggggccgagggacagtggtcaccgtctccccag

SEQ ID NO: 5476 - DNA, 34 bp, synthetic construct
  misc_feature 1..34: note = Synthetic construct
  source 1..34: mol_type = other DNA
tggggccagggcaccctggtcaccgtcacctccg

SEQ ID NO: 5477 - DNA, 33 bp, synthetic construct
  misc_feature 1..33: note = Synthetic construct
  source 1..33: mol_type = other DNA
tggggcaaggggaccacggtcaccgtctcctca

SEQ ID NO: 5478 - DNA, 33 bp, synthetic construct
  misc_feature 1..33: note = Synthetic construct
  source 1..33: mol_type = other DNA
tggggcgaagggaccgcggtcaccgtctcctca

SEQ ID NO: 5479 - DNA, 33 bp, synthetic construct
  misc_feature 1..33: note = Synthetic construct
  source 1..33: mol_type = other DNA
tggggcaaagggacgacggtcaccgtctcctca

SEQ ID NO: 5480 - DNA, 34 bp, synthetic construct
  misc_feature 1..34: note = Synthetic construct
  source 1..34: mol_type = other DNA
tggggccacggaaccctggtcaccgtctccgcag

SEQ ID NO: 5481 - DNA, 34 bp, synthetic construct
  misc_feature 1..34: note = Synthetic construct
  source 1..34: mol_type = other DNA
tggggccaagggacaatggtcaccgtctcttcac

SEQ ID NO: 5482 - DNA, 34 bp, synthetic construct
  misc_feature 1..34: note = Synthetic construct
  source 1..34: mol_type = other DNA
tggggccaagggacaccggtcaccgtctcttcag

SEQ ID NO: 5483 - DNA, 34 bp, synthetic construct
  misc_feature 1..34: note = Synthetic construct
  source 1..34: mol_type = other DNA
tggggccagggcaccgtggtcaccgtctcctcag

SEQ ID NO: 5484 - DNA, 34 bp, synthetic construct
  misc_feature 1..34: note = Synthetic construct
  source 1..34: mol_type = other DNA
tggggccagggaaccctagtctccgtctccccag

SEQ ID NO: 5485 - DNA, 34 bp, synthetic construct
  misc_feature 1..34: note = Synthetic construct
  source 1..34: mol_type = other DNA
tggggccagggaaccctggtcaccgtctcctcgg

SEQ ID NO: 5486 - DNA, 34 bp, synthetic construct
  misc_feature 1..34: note = Synthetic construct
  source 1..34: mol_type = other DNA
tggggccagggaaccctggtcaccgtctcatcag

SEQ ID NO: 5487 - DNA, 34 bp, synthetic construct
  misc_feature 1..34: note = Synthetic construct
  source 1..34: mol_type = other DNA
tggggccaggggacaaagctcatcgtctcttcag

SEQ ID NO: 5488 - DNA, 34 bp, synthetic construct
  misc_feature 1..34: note = Synthetic construct
  source 1..34: mol_type = other DNA
tggggccgtggcaccctgctcactgtctcctcag

SEQ ID NO: 5489 - DNA, 34 bp, synthetic construct
  misc_feature 1..34: note = Synthetic construct
  source 1..34: mol_type = other DNA
tggggccgtggcactttggtcactgtctccccag

SEQ ID NO: 5490 - DNA, 34 bp, synthetic construct
  misc_feature 1..34: note = Synthetic construct
  source 1..34: mol_type = other DNA
tggggccaaggaaccctggtcaccgtctcctcat

SEQ ID NO: 5491 - DNA, 34 bp, synthetic construct
  misc_feature 1..34: note = Synthetic construct
  source 1..34: mol_type = other DNA
tggggccagggaaccctggtcagcgtctcctcag

SEQ ID NO: 5492 - DNA, 34 bp, synthetic construct
  misc_feature 1..34: note = Synthetic construct
  source 1..34: mol_type = other DNA
tggggccagggaaccctggtcaccgtctcctccg

SEQ ID NO: 5493 - DNA, 34 bp, synthetic construct
  misc_feature 1..34: note = Synthetic construct
  source 1..34: mol_type = other DNA
tggggccagggaaccccggtcagcgtctcatcag

SEQ ID NO: 5494 - DNA, 34 bp, synthetic construct
  misc_feature 1..34: note = Synthetic construct
  source 1..34: mol_type = other DNA
tggggccagggcgccctgctcaccgtgtccgcag

SEQ ID NO: 5495 - DNA, 34 bp, synthetic construct
  misc_feature 1..34: note = Synthetic construct
  source 1..34: mol_type = other DNA
tggggccagggaaccctggttgccgtctctgcag

SEQ ID NO: 5496 - DNA, 34 bp, synthetic construct
  misc_feature 1..34: note = Synthetic construct
  source 1..34: mol_type = other DNA
tggggccgggggaccacagtcaccgtctcttcag

SEQ ID NO: 5497 - DNA, 34 bp, synthetic construct
  misc_feature 1..34: note = Synthetic construct
  source 1..34: mol_type = other DNA
tggggccatggaaccctggtcaccgtctcctcag

SEQ ID NO: 5498 - DNA, 34 bp, synthetic construct
  misc_feature 1..34: note = Synthetic construct
  source 1..34: mol_type = other DNA
tggggccagggaaccccggtcatcgtctcctcag

SEQ ID NO: 5499 - DNA, 34 bp, synthetic construct
  misc_feature 1..34: note = Synthetic construct
  source 1..34: mol_type = other DNA
tggggccaagggacactggtcaccgtctcctcag

SEQ ID NO: 5500 - DNA, 34 bp, synthetic construct
  misc_feature 1..34: note = Synthetic construct
  source 1..34: mol_type = other DNA
tggggacagggagccctagtcaccgtctcctcag

SEQ ID NO: 5501 - DNA, 34 bp, synthetic construct
  misc_feature 1..34: note = Synthetic construct
  source 1..34: mol_type = other DNA
tggggccagggaaccctggtgaccgtctcctcag

SEQ ID NO: 5502 - DNA, 34 bp, synthetic construct
  misc_feature 1..34: note = Synthetic construct
  source 1..34: mol_type = other DNA
tggggccaggggacaatggtcaccgtctcctcag

SEQ ID NO: 5503 - DNA, 34 bp, synthetic construct
  misc_feature 1..34: note = Synthetic construct
  source 1..34: mol_type = other DNA
tggggccagggaaccctggtcaccgtctccgccg

SEQ ID NO: 5504 - DNA, 34 bp, synthetic construct
  misc_feature 1..34: note = Synthetic construct
  source 1..34: mol_type = other DNA
tggggccaagggacattggtcaccgtctcctcag

SEQ ID NO: 5505 - DNA, 34 bp, synthetic construct
  misc_feature 1..34: note = Synthetic construct
  source 1..34: mol_type = other DNA
tggggccaagggacaatggtcaccgtgttttcag

SEQ ID NO: 5506 - DNA, 33 bp, synthetic construct
  misc_feature 1..33: note = Synthetic construct
  source 1..33: mol_type = other DNA
tgggggaaagggaccacggtcatcgtctcctca

SEQ ID NO: 5507 - DNA, 34 bp, synthetic construct
  misc_feature 1..34: note = Synthetic construct
  source 1..34: mol_type = other DNA
tggggcccgggaaccctggtcatcgtctcgtcag

SEQ ID NO: 5508 - DNA, 34 bp, synthetic construct
  misc_feature 1..34: note = Synthetic construct
  source 1..34: mol_type = other DNA
tggggccgggggacaatggtcatcgtctcttcag

SEQ ID NO: 5509 - DNA, 34 bp, synthetic construct
  misc_feature 1..34: note = Synthetic construct
  source 1..34: mol_type = other DNA
tggggccagggaacccgggtcaccgtctcttcag

SEQ ID NO: 5510 - DNA, 34 bp, synthetic construct
  misc_feature 1..34: note = Synthetic construct
  source 1..34: mol_type = other DNA
tggggccaagggacaattgtcaccgtctcctcag

SEQ ID NO: 5511 - DNA, 34 bp, synthetic construct
  misc_feature 1..34: note = Synthetic construct
  source 1..34: mol_type = other DNA
tggggccagggagtcctggtcaccgtctcctctg

SEQ ID NO: 5512 - DNA, 34 bp, synthetic construct
  misc_feature 1..34: note = Synthetic construct
  source 1..34: mol_type = other DNA
tggggccagggaacccaggtcaccgtcgcctcag

SEQ ID NO: 5513 - DNA, 33 bp, synthetic construct
  misc_feature 1..33: note = Synthetic construct
  source 1..33: mol_type = other DNA
tggggcaaagggaccacggtcaccgtctcatca

SEQ ID NO: 5514 - DNA, 30 bp, synthetic construct
  misc_feature 1..30: note = Synthetic construct
  source 1..30: mol_type = other DNA
tggggccagggaaccctggtcaccgtctcc

SEQ ID NO: 5515 - DNA, 34 bp, synthetic construct
  misc_feature 1..34: note = Synthetic construct
  source 1..34: mol_type = other DNA
tggggccaggggatcctggtcaccgtctcctcag

SEQ ID NO: 5516 - DNA, 33 bp, synthetic construct
  misc_feature 1..33: note = Synthetic construct
  source 1..33: mol_type = other DNA
tggggcacagggaccacggtcaccgtctcctcc

SEQ ID NO: 5517 - DNA, 34 bp, synthetic construct
  misc_feature 1..34: note = Synthetic construct
  source 1..34: mol_type = other DNA
tggggccagggaactctggtcaccgtctcctcct

SEQ ID NO: 5518 - DNA, 34 bp, synthetic construct
  misc_feature 1..34: note = Synthetic construct
  source 1..34: mol_type = other DNA
tggggccagggaaccctggtcaacgtctcctcag

SEQ ID NO: 5519 - DNA, 34 bp, synthetic construct
  misc_feature 1..34: note = Synthetic construct
  source 1..34: mol_type = other DNA
tggggccaggggacccgggtcaccgtctcctcag

SEQ ID NO: 5520 - DNA, 33 bp, synthetic construct
  misc_feature 1..33: note = Synthetic construct
  source 1..33: mol_type = other DNA
tggggcaatggggccacggtcaccgtctcctca

SEQ ID NO: 5521 - DNA, 34 bp, synthetic construct
  misc_feature 1..34: note = Synthetic construct
  source 1..34: mol_type = other DNA
tggggccagggggccctggtgaccgtctcctcag

SEQ ID NO: 5522 - DNA, 34 bp, synthetic construct
  misc_feature 1..34: note = Synthetic construct
  source 1..34: mol_type = other DNA
tggggccaagggacaatggtcgccgtctcttcgg

SEQ ID NO: 5523 - DNA, 34 bp, synthetic construct
  misc_feature 1..34: note = Synthetic construct
  source 1..34: mol_type = other DNA
tggggccagggcaccgtagtcaccgtctcttcaa

SEQ ID NO: 5524 - DNA, 34 bp, synthetic construct
  misc_feature 1..34: note = Synthetic construct
  source 1..34: mol_type = other DNA
tggggccagggaatcctggtcaccgtctcctcag

SEQ ID NO: 5525 - DNA, 34 bp, synthetic construct
  misc_feature 1..34: note = Synthetic construct
  source 1..34: mol_type = other DNA
tggggccacgggacaaaggtcactgtctctgcag

SEQ ID NO: 5526 - DNA, 34 bp, synthetic construct
  misc_feature 1..34: note = Synthetic construct
  source 1..34: mol_type = other DNA
tggggccagggagccctggtcacggtctcctcag

SEQ ID NO: 5527 - DNA, 34 bp, synthetic construct
  misc_feature 1..34: note = Synthetic construct
  source 1..34: mol_type = other DNA
tggggccggggaacccaggtcaccgtctcctcag

SEQ ID NO: 5528 - DNA, 33 bp, synthetic construct
  misc_feature 1..33: note = Synthetic construct
  source 1..33: mol_type = other DNA
tggggcaaaggggccacggtcaccgtctcctca

SEQ ID NO: 5529 - DNA, 34 bp, synthetic construct
  misc_feature 1..34: note = Synthetic construct
  source 1..34: mol_type = other DNA
tggggccagggaaccctggtcactgtctcctctg

SEQ ID NO: 5530 - DNA, 34 bp, synthetic construct
  misc_feature 1..34: note = Synthetic construct
  source 1..34: mol_type = other DNA
tggagcccgggaaccctggtcaccgtctcctcag

SEQ ID NO: 5531 - DNA, 33 bp, synthetic construct
  misc_feature 1..33: note = Synthetic construct
  source 1..33: mol_type = other DNA
tggggcgaagggaccgcggtcaaggtctcctca

SEQ ID NO: 5532 - DNA, 34 bp, synthetic construct
  misc_feature 1..34: note = Synthetic construct
  source 1..34: mol_type = other DNA
tggagccagggaaccctggtcaccgtctcctcag

SEQ ID NO: 5533 - DNA, 34 bp, synthetic construct
  misc_feature 1..34: note = Synthetic construct
  source 1..34: mol_type = other DNA
tggggccagggagccctggtcaccgtctcctccg

SEQ ID NO: 5534 - DNA, 34 bp, synthetic construct
  misc_feature 1..34: note = Synthetic construct
  source 1..34: mol_type = other DNA
tggggcccgggactcttggtcaccgtctccgcag

SEQ ID NO: 5535 - DNA, 34 bp, synthetic construct
  misc_feature 1..34: note = Synthetic construct
  source 1..34: mol_type = other DNA
tggggccagggaaccctggttagcgtctcctcag

SEQ ID NO: 5536 - DNA, 34 bp, synthetic construct
  misc_feature 1..34: note = Synthetic construct
  source 1..34: mol_type = other DNA
tggagcccgggatcgtgggtcaccatctcctcag

SEQ ID NO: 5537 - DNA, 34 bp, synthetic construct
  misc_feature 1..34: note = Synthetic construct
  source 1..34: mol_type = other DNA
tggggccagggaaccctggtcaccgtctactcag

SEQ ID NO: 5538 - DNA, 34 bp, synthetic construct
  misc_feature 1..34: note = Synthetic construct
  source 1..34: mol_type = other DNA
tggggccagggaaccctcgtcagcgtctcctcag

SEQ ID NO: 5539 - DNA, 33 bp, synthetic construct
  misc_feature 1..33: note = Synthetic construct
  source 1..33: mol_type = other DNA
tggggcacagggaccacggtcaccgtctcctca

SEQ ID NO: 5540 - DNA, 34 bp, synthetic construct
  misc_feature 1..34: note = Synthetic construct
  source 1..34: mol_type = other DNA
tggagccagggaaccctggtcatcgtctcctcag

SEQ ID NO: 5541 - DNA, 33 bp, synthetic construct
  misc_feature 1..33: note = Synthetic construct
  source 1..33: mol_type = other DNA
tggggcgatgggaccacggtcaccgtctcctca

SEQ ID NO: 5542 - DNA, 33 bp, synthetic construct
  misc_feature 1..33: note = Synthetic construct
  source 1..33: mol_type = other DNA
tggggcagagggaccacggtcatcgtctcctca

SEQ ID NO: 5543 - DNA, 34 bp, synthetic construct
  misc_feature 1..34: note = Synthetic construct
  source 1..34: mol_type = other DNA
tggggccagggaacccgggtcaccgtctcctcgg

SEQ ID NO: 5544 - DNA, 34 bp, synthetic construct
  misc_feature 1..34: note = Synthetic construct
  source 1..34: mol_type = other DNA
tggggccaaggaggcctggtgaccgtcccctcag

SEQ ID NO: 5545 - DNA, 34 bp, synthetic construct
  misc_feature 1..34: note = Synthetic construct
  source 1..34: mol_type = other DNA
tggggccagggaaccctgctcaccgtctcctcag

SEQ ID NO: 5546 - DNA, 34 bp, synthetic construct
  misc_feature 1..34: note = Synthetic construct
  source 1..34: mol_type = other DNA
tggggccacgggacactggtcaccgtctcttcag

SEQ ID NO: 5547 - DNA, 34 bp, synthetic construct
  misc_feature 1..34: note = Synthetic construct
  source 1..34: mol_type = other DNA
tggggccagggaatactggtcaccgtctcctcag

SEQ ID NO: 5548 - DNA, 33 bp, synthetic construct
  misc_feature 1..33: note = Synthetic construct
  source 1..33: mol_type = other DNA
tggggcgaagggaccacggtcaccgtctcctca

SEQ ID NO: 5549 - DNA, 34 bp, synthetic construct
  misc_feature 1..34: note = Synthetic construct
  source 1..34: mol_type = other DNA
tggggcctgggaacccttgtcaccgtctcctcag

SEQ ID NO: 5550 - DNA, 34 bp, synthetic construct
  misc_feature 1..34: note = Synthetic construct
  source 1..34: mol_type = other DNA
tggggccagggaaccctggtcaatgtctcctcag

SEQ ID NO: 5551 - DNA, 34 bp, synthetic construct
  misc_feature 1..34: note = Synthetic construct
  source 1..34: mol_type = other DNA
tggggccagggagccccggtcaccgtctcctcag

SEQ ID NO: 5552 - DNA, 34 bp, synthetic construct
  misc_feature 1..34: note = Synthetic construct
  source 1..34: mol_type = other DNA
tggggccagggaagcctggtcaccatctcctccg

SEQ ID NO: 5553 - DNA, 34 bp, synthetic construct
  misc_feature 1..34: note = Synthetic construct
  source 1..34: mol_type = other DNA
tggggccagggactcctggtcaccgtctccccag

SEQ ID NO: 5554 - DNA, 34 bp, synthetic construct
  misc_feature 1..34: note = Synthetic construct
  source 1..34: mol_type = other DNA
tggggccagggaaccctggtgaccgtctccgcag

SEQ ID NO: 5555 - DNA, 33 bp, synthetic construct
  misc_feature 1..33: note = Synthetic construct
  source 1..33: mol_type = other DNA
tggggcaaggggaccgcggtcaccgtctcctca

SEQ ID NO: 5556 - DNA, 34 bp, synthetic construct
  misc_feature 1..34: note = Synthetic construct
  source 1..34: mol_type = other DNA
tggggccagggaaccctggtcaccgtctcctcct

SEQ ID NO: 5557 - DNA, 34 bp, synthetic construct
  misc_feature 1..34: note = Synthetic construct
  source 1..34: mol_type = other DNA
tggggccagggaaccctagtcaccgtctcctcag

SEQ ID NO: 5558 - DNA, 34 bp, synthetic construct
  misc_feature 1..34: note = Synthetic construct
  source 1..34: mol_type = other DNA
tggggccggggatcccaggtcattgtctcctcag

SEQ ID NO: 5559 - DNA, 34 bp, synthetic construct
  misc_feature 1..34: note = Synthetic construct
  source 1..34: mol_type = other DNA
tggggccacgggacaagggtcaccgtctcttcag

SEQ ID NO: 5560 - DNA, 33 bp, synthetic construct
  misc_feature 1..33: note = Synthetic construct
  source 1..33: mol_type = other DNA
tggggcacagggaccacggtcatcgtctcctca

SEQ ID NO: 5561 - DNA, 34 bp, synthetic construct
  misc_feature 1..34: note = Synthetic construct
  source 1..34: mol_type = other DNA
tggggccaagggacaatggtcaccgtctctccag

SEQ ID NO: 5562 - DNA, 34 bp, synthetic construct
  misc_feature 1..34: note = Synthetic construct
  source 1..34: mol_type = other DNA
tggggccagggaatcctggtcatcgtctcctcag

SEQ ID NO: 5563 - DNA, 34 bp, synthetic construct
  misc_feature 1..34: note = Synthetic construct
  source 1..34: mol_type = other DNA
tggggccagggaaccctggtcactgtctcctcgg

SEQ ID NO: 5564 - DNA, 33 bp, synthetic construct
  misc_feature 1..33: note = Synthetic construct
  source 1..33: mol_type = other DNA
tggggcagagggaccacggtcaccgtctcctca

SEQ ID NO: 5565 - DNA, 34 bp, synthetic construct
  misc_feature 1..34: note = Synthetic construct
  source 1..34: mol_type = other DNA
tggggccgtggcaccctggtcacggtctcctcag

SEQ ID NO: 5566 - DNA, 34 bp, synthetic construct
  misc_feature 1..34: note = Synthetic construct
  source 1..34: mol_type = other DNA
tggggccagggaaccctggtcgccgtctcctcaa

SEQ ID NO: 5567 - DNA, 34 bp, synthetic construct
  misc_feature 1..34: note = Synthetic construct
  source 1..34: mol_type = other DNA
tggggccagggaacccgggtcaacgtctcttcag

SEQ ID NO: 5568 - DNA, 34 bp, synthetic construct
  misc_feature 1..34: note = Synthetic construct
  source 1..34: mol_type = other DNA
tggggccagggaatcccggtcaccgtctcgtcag

SEQ ID NO: 5569 - DNA, 34 bp, synthetic construct
  misc_feature 1..34: note = Synthetic construct
  source 1..34: mol_type = other DNA
tggggccaagggacattggtcagcgtctcttcag

SEQ ID NO: 5570 - DNA, 33 bp, synthetic construct
  misc_feature 1..33: note = Synthetic construct
  source 1..33: mol_type = other DNA
tggggcaccgggacaacggtgaccgtctcctca

SEQ ID NO: 5571 - DNA, 33 bp, synthetic construct
  misc_feature 1..33: note = Synthetic construct
  source 1..33: mol_type = other DNA
tggggcggagggaccagtgtcaccgtctcctca

SEQ ID NO: 5572 - DNA, 34 bp, synthetic construct
  misc_feature 1..34: note = Synthetic construct
  source 1..34: mol_type = other DNA
tggggccagggaaccctggtcgccgtctcctcag

SEQ ID NO: 5573 - DNA, 34 bp, synthetic construct
  misc_feature 1..34: note = Synthetic construct
  source 1..34: mol_type = other DNA
tggggtctggggacaaaggtcaccgtcgcttcag

SEQ ID NO: 5574 - DNA, 34 bp, synthetic construct
  misc_feature 1..34: note = Synthetic construct
  source 1..34: mol_type = other DNA
tggggccaagggacactggtcatcgtctcttcag

SEQ ID NO: 5575 - DNA, 34 bp, synthetic construct
  misc_feature 1..34: note = Synthetic construct
  source 1..34: mol_type = other DNA
tggggccagggaaccctggtcaccgtcacctcaa

SEQ ID NO: 5576 - DNA, 34 bp, synthetic construct
  misc_feature 1..34: note = Synthetic construct
  source 1..34: mol_type = other DNA
tggggccacgggacaatggtcatcgtctcttcag

SEQ ID NO: 5577 - DNA, 24 bp, synthetic construct
  misc_feature 1..24: note = Synthetic construct
  source 1..24: mol_type = other DNA
gattacagttttaccacctatgga

SEQ ID NO: 5578 - DNA, 24 bp, synthetic construct
  misc_feature 1..24: note = Synthetic construct
  source 1..24: mol_type = other DNA
ggatacaccttcaccggtttctac

SEQ ID NO: 5579 - DNA, 24 bp, synthetic construct
  misc_feature 1..24: note = Synthetic construct
  source 1..24: mol_type = other DNA
ggaggcaccttcggcagctctgct

SEQ ID NO: 5580 - DNA, 24 bp, synthetic construct
  misc_feature 1..24: note = Synthetic construct
  source 1..24: mol_type = other DNA
gggttcatgttcagtggttctact

SEQ ID NO: 5581 - DNA, 24 bp, synthetic construct
  misc_feature 1..24: note = Synthetic construct
  source 1..24: mol_type = other DNA
ggattcaccttcagtagctatggc

SEQ ID NO: 5582 - DNA, 24 bp, synthetic construct
  misc_feature 1..24: note = Synthetic construct
  source 1..24: mol_type = other DNA
ggattcaccttcgatagttatggc

SEQ ID NO: 5583 - DNA, 24 bp, synthetic construct
  misc_feature 1..24: note = Synthetic construct
  source 1..24: mol_type = other DNA
ggcttcaccttcagtggctctgct

SEQ ID NO: 5584 - DNA, 24 bp, synthetic construct
  misc_feature 1..24: note = Synthetic construct
  source 1..24: mol_type = other DNA
gggttctccttcagtggctcggct

SEQ ID NO: 5585 - DNA, 24 bp, synthetic construct
  misc_feature 1..24: note = Synthetic construct
  source 1..24: mol_type = other DNA
gggttcaccttcagtgagtctgca

SEQ ID NO: 5586 - DNA, 24 bp, synthetic construct
  misc_feature 1..24: note = Synthetic construct
  source 1..24: mol_type = other DNA
ggatacaccttcaccgactactac

SEQ ID NO: 5587 - DNA, 24 bp, synthetic construct
  misc_feature 1..24: note = Synthetic construct
  source 1..24: mol_type = other DNA
ggatacaccttcaccagttactat

SEQ ID NO: 5588 - DNA, 24 bp, synthetic construct
  misc_feature 1..24: note = Synthetic construct
  source 1..24: mol_type = other DNA
ggatacaccttcaccgcctactac

SEQ ID NO: 5589 - DNA, 24 bp, synthetic construct
  misc_feature 1..24: note = Synthetic construct
  source 1..24: mol_type = other DNA
ggatacacctacagcggctactat

SEQ ID NO: 5590 - DNA, 24 bp, synthetic construct
  misc_feature 1..24: note = Synthetic construct
  source 1..24: mol_type = other DNA
ggatacaccttcacaaactatgct

SEQ ID NO: 5591 - DNA, 24 bp, synthetic construct
  misc_feature 1..24: note = Synthetic construct
  source 1..24: mol_type = other DNA
ggatacaccttcatcggctattat

SEQ ID NO: 5592 - DNA, 24 bp, synthetic construct
  misc_feature 1..24: note = Synthetic construct
  source 1..24: mol_type = other DNA
ggctacactttcatcgataaccct

SEQ ID NO: 5593 - DNA, 24 bp, synthetic construct
  misc_feature 1..24: note = Synthetic construct
  source 1..24: mol_type = other DNA
ggattcaccctcagtgactctgtt

SEQ ID NO: 5594 - DNA, 24 bp, synthetic construct
  misc_feature 1..24: note = Synthetic construct
  source 1..24: mol_type = other DNA
ggatacaccttcaccggctactac

SEQ ID NO: 5595 - DNA, 21 bp, synthetic construct
  misc_feature 1..21: note = Synthetic construct
  source 1..21: mol_type = other DNA
ggagacgccttcagttatggt

SEQ ID NO: 5596 - DNA, 24 bp, synthetic construct
  misc_feature 1..24: note = Synthetic construct
  source 1..24: mol_type = other DNA
gcatacaccttcagtaactatgct

SEQ ID NO: 5597 - DNA, 24 bp, synthetic construct
  misc_feature 1..24: note = Synthetic construct
  source 1..24: mol_type = other DNA
ggatacaccttcattagctatgct

SEQ ID NO: 5598 - DNA, 24 bp, synthetic construct
  misc_feature 1..24: note = Synthetic construct
  source 1..24: mol_type = other DNA
ggatacaccttcaccggctacttt

SEQ ID NO: 5599 - DNA, 24 bp, synthetic construct
  misc_feature 1..24: note = Synthetic construct
  source 1..24: mol_type = other DNA
ggatactccttcaccgactacccc

SEQ ID NO: 5600 - DNA, 24 bp, synthetic construct
  misc_feature 1..24: note = Synthetic construct
  source 1..24: mol_type = other DNA
ggatacattttcaccgactactac

SEQ ID NO: 5601 - DNA, 24 bp, synthetic construct
  misc_feature 1..24: note = Synthetic construct
  source 1..24: mol_type = other DNA
gaatacatcttcagtaactatgtt

SEQ ID NO: 5602 - DNA, 24 bp, synthetic construct
  misc_feature 1..24: note = Synthetic construct
  source 1..24: mol_type = other DNA
ggatacaccttcaccaaccatgat

SEQ ID NO: 5603 - DNA, 24 bp, synthetic construct
  misc_feature 1..24: note = Synthetic construct
  source 1..24: mol_type = other DNA
ggatacacgttcaccaactatgat

SEQ ID NO: 5604 - DNA, 24 bp, synthetic construct
  misc_feature 1..24: note = Synthetic construct
  source 1..24: mol_type = other DNA
ggatacaccttcaccagctatgat

SEQ ID NO: 5605 - DNA, 24 bp, synthetic construct
  misc_feature 1..24: note = Synthetic construct
  source 1..24: mol_type = other DNA
ggatacaacttcgtcagctatgat

SEQ ID NO: 5606 - DNA, 24 bp, synthetic construct
  misc_feature 1..24: note = Synthetic construct
  source 1..24: mol_type = other DNA
ggatacacctttctcaactatgat

SEQ ID NO: 5607 - DNA, 24 bp, synthetic construct
  misc_feature 1..24: note = Synthetic construct
  source 1..24: mol_type = other DNA
ggatacaccttcactagctttgat

SEQ ID NO: 5608 - DNA, 24 bp, synthetic construct
  misc_feature 1..24: note = Synthetic construct
  source 1..24: mol_type = other DNA
ggagacaccttcagcagttttgct

SEQ ID NO: 5609 - DNA, 24 bp, synthetic construct
  misc_feature 1..24: note = Synthetic construct
  source 1..24: mol_type = other DNA
ggaggcaccttcagtagtgatgct

SEQ ID NO: 5610 - DNA, 24 bp, synthetic construct
  misc_feature 1..24: note = Synthetic construct
  source 1..24: mol_type = other DNA
ggttacacttttaccagctatggt

SEQ ID NO: 5611 - DNA, 24 bp, synthetic construct
  misc_feature 1..24: note = Synthetic construct
  source 1..24: mol_type = other DNA
ggaggcaccttcagcaactatgct

SEQ ID NO: 5612 - DNA, 24 bp, synthetic construct
  misc_feature 1..24: note = Synthetic construct
  source 1..24: mol_type = other DNA
ggataccccttcagcgactatgat

SEQ ID NO: 5613 - DNA, 24 bp, synthetic construct
  misc_feature 1..24: note = Synthetic construct
  source 1..24: mol_type = other DNA
ggatacagtttcacgacctatgct

SEQ ID NO: 5614 - DNA, 24 bp, synthetic construct
  misc_feature 1..24: note = Synthetic construct
  source 1..24: mol_type = other DNA
ggaggcaccttcagcagctattct

SEQ ID NO: 5615 - DNA, 24 bp, synthetic construct
  misc_feature 1..24: note = Synthetic construct
  source 1..24: mol_type = other DNA
ggaggctccttcagcagctttgct

SEQ ID NO: 5616 - DNA, 24 bp, synthetic construct
  misc_feature 1..24: note = Synthetic construct
  source 1..24: mol_type = other DNA
agaggcaccttcagcagctatgct

SEQ ID NO: 5617 - DNA, 24 bp, synthetic construct
  misc_feature 1..24: note = Synthetic construct
  source 1..24: mol_type = other DNA
ggttacacctttaccgactatggt

SEQ ID NO: 5618 - DNA, 24 bp, synthetic construct
  misc_feature 1..24: note = Synthetic construct
  source 1..24: mol_type = other DNA
ggttacacccttaacaactatggt

SEQ ID NO: 5619 - DNA, 24 bp, synthetic construct
  misc_feature 1..24: note = Synthetic construct
  source 1..24: mol_type = other DNA
ggaggcaccttcagcagccatgct

SEQ ID NO: 5620 - DNA, 24 bp, synthetic construct
  misc_feature 1..24: note = Synthetic construct
  source 1..24: mol_type = other DNA
ggtttcaccatttccagttatggt

SEQ ID NO: 5621 - DNA, 24 bp, synthetic construct
  misc_feature 1..24: note = Synthetic construct
  source 1..24: mol_type = other DNA
ggttacaccttaacaagttatggt

SEQ ID NO: 5622 - DNA, 24 bp, synthetic construct
  misc_feature 1..24: note = Synthetic construct
  source 1..24: mol_type = other DNA
ggagacaccttcaacaattatgtt

SEQ ID NO: 5623 - DNA, 24 bp, synthetic construct
  misc_feature 1..24: note = Synthetic construct
  source 1..24: mol_type = other DNA
ggggtgacatctagtaactacccc

SEQ ID NO: 5624 - DNA, 24 bp, synthetic construct
  misc_feature 1..24: note = Synthetic construct
  source 1..24: mol_type = other DNA
ggaggcaccttcagcagtttttcc

SEQ ID NO: 5625 - DNA, 24 bp, synthetic construct
  misc_feature 1..24: note = Synthetic construct
  source 1..24: mol_type = other DNA
ggttacaccttcaccaactttggt

SEQ ID NO: 5626 - DNA, 24 bp, synthetic construct
  misc_feature 1..24: note = Synthetic construct
  source 1..24: mol_type = other DNA
ggaggcaccttcagcagttttgct

SEQ ID NO: 5627 - DNA, 24 bp, synthetic construct
  misc_feature 1..24: note = Synthetic construct
  source 1..24: mol_type = other DNA
ggaggcatgttcaattcctatgct

SEQ ID NO: 5628 - DNA, 24 bp, synthetic construct
  misc_feature 1..24: note = Synthetic construct
  source 1..24: mol_type = other DNA
ggaggcaccttcagcagctatgca

SEQ ID NO: 5629 - DNA, 24 bp, synthetic construct
  misc_feature 1..24: note = Synthetic construct
  source 1..24: mol_type = other DNA
ggaggcaccttcagcagctatgct

SEQ ID NO: 5630 - DNA, 24 bp, synthetic construct
  misc_feature 1..24: note = Synthetic construct
  source 1..24: mol_type = other DNA
ggaggaaccttcagcagctatagt

SEQ ID NO: 5631 - DNA, 24 bp, synthetic construct
  misc_feature 1..24: note = Synthetic construct
  source 1..24: mol_type = other DNA
ggaggcacctttagcagttatgct

SEQ ID NO: 5632 - DNA, 24 bp, synthetic construct
  misc_feature 1..24: note = Synthetic construct
  source 1..24: mol_type = other DNA
ggttacacctttaggaactatggt

SEQ ID NO: 5633 - DNA, 24 bp, synthetic construct
  misc_feature 1..24: note = Synthetic construct
  source 1..24: mol_type = other DNA
ggttacagcttttccagttatggt

SEQ ID NO: 5634 - DNA, 24 bp, synthetic construct
  misc_feature 1..24: note = Synthetic construct
  source 1..24: mol_type = other DNA
ggttacagctttaccaactatggt

SEQ ID NO: 5635 - DNA, 24 bp, synthetic construct
  misc_feature 1..24: note = Synthetic construct
  source 1..24: mol_type = other DNA
ggttacacctttaccagctatggt

SEQ ID NO: 5636 - DNA, 24 bp, synthetic construct
  misc_feature 1..24: note = Synthetic construct
  source 1..24: mol_type = other DNA
ggaggcgccttcagtgcctattca

SEQ ID NO: 5637 - DNA, 24 bp, synthetic construct
  misc_feature 1..24: note = Synthetic construct
  source 1..24: mol_type = other DNA
ggttacacttttaccagttatggt

SEQ ID NO: 5638 - DNA, 24 bp, synthetic construct
  misc_feature 1..24: note = Synthetic construct
  source 1..24: mol_type = other DNA
ggaggcgccttcagtaggtatgtt

SEQ ID NO: 5639 - DNA, 24 bp, synthetic construct
  misc_feature 1..24: note = Synthetic construct
  source 1..24: mol_type = other DNA
ggaggcaccctcgggaactatgct

SEQ ID NO: 5640 - DNA, 24 bp, synthetic construct
  misc_feature 1..24: note = Synthetic construct
  source 1..24: mol_type = other DNA
ggttatagcttttccagttttggc

SEQ ID NO: 5641 - DNA, 24 bp, synthetic construct
  misc_feature 1..24: note = Synthetic construct
  source 1..24: mol_type = other DNA
ggaggcaacttcaacaaccttgtt

SEQ ID NO: 5642 - DNA, 24 bp, synthetic construct
  misc_feature 1..24: note = Synthetic construct
  source 1..24: mol_type = other DNA
ggaggcaccttcagcacctctgga

SEQ ID NO: 5643 - DNA, 24 bp, synthetic construct
  misc_feature 1..24: note = Synthetic construct
  source 1..24: mol_type = other DNA
ggctacactttcaatagatacggt

SEQ ID NO: 5644 - DNA, 24 bp, synthetic construct
  misc_feature 1..24: note = Synthetic construct
  source 1..24: mol_type = other DNA
ggaggcaccttcagcaactctgct

SEQ ID NO: 5645 - DNA, 24 bp, synthetic construct
  misc_feature 1..24: note = Synthetic construct
  source 1..24: mol_type = other DNA
ggttacacctttaccaactatggt

SEQ ID NO: 5646 - DNA, 24 bp, synthetic construct
  misc_feature 1..24: note = Synthetic construct
  source 1..24: mol_type = other DNA
ggttacacctttatcaactatggt

SEQ ID NO: 5647 - DNA, 24 bp, synthetic construct
  misc_feature 1..24: note = Synthetic construct
  source 1..24: mol_type = other DNA
ggaggcaccttcggctcctatgca

SEQ ID NO: 5648 - DNA, 24 bp, synthetic construct
  misc_feature 1..24: note = Synthetic construct
  source 1..24: mol_type = other DNA
ggatacactttcactactcatgca

SEQ ID NO: 5649 - DNA, 24 bp, synthetic construct
  misc_feature 1..24: note = Synthetic construct
  source 1..24: mol_type = other DNA
ggatacacattcaccgactactac

SEQ ID NO: 5650 - DNA, 24 bp, synthetic construct
  misc_feature 1..24: note = Synthetic construct
  source 1..24: mol_type = other DNA
ggattcagcttcagtgaatttggc

SEQ ID NO: 5651 - DNA, 24 bp, synthetic construct
  misc_feature 1..24: note = Synthetic construct
  source 1..24: mol_type = other DNA
ggatacaccttcaccgactacttc

SEQ ID NO: 5652 - DNA, 24 bp, synthetic construct
  misc_feature 1..24: note = Synthetic construct
  source 1..24: mol_type = other DNA
ggaggcaccttcagcagctatggt

SEQ ID NO: 5653 - DNA, 24 bp, synthetic construct
  misc_feature 1..24: note = Synthetic construct
  source 1..24: mol_type = other DNA
ggagagacgtccagcaactactat

SEQ ID NO: 5654 - DNA, 24 bp, synthetic construct
  misc_feature 1..24: note = Synthetic construct
  source 1..24: mol_type = other DNA
ggatacaactttattgactactat

SEQ ID NO: 5655 - DNA, 24 bp, synthetic construct
  misc_feature 1..24: note = Synthetic construct
  source 1..24: mol_type = other DNA
ggatacaacttcaatgaccacttc

SEQ ID NO: 5656 - DNA, 24 bp, synthetic construct
  misc_feature 1..24: note = Synthetic construct
  source 1..24: mol_type = other DNA
gggtacaccctcactgacttagcc

SEQ ID NO: 5657 - DNA, 24 bp, synthetic construct
  misc_feature 1..24: note = Synthetic construct
  source 1..24: mol_type = other DNA
ggaaaaaccctcactgaattactc

SEQ ID NO: 5658 - DNA, 24 bp, synthetic construct
  misc_feature 1..24: note = Synthetic construct
  source 1..24: mol_type = other DNA
ggacacatcgtcagcagctatgag

SEQ ID NO: 5659 - DNA, 24 bp, synthetic construct
  misc_feature 1..24: note = Synthetic construct
  source 1..24: mol_type = other DNA
ggatacaccttcaccgattactat

SEQ ID NO: 5660 - DNA, 24 bp, synthetic construct
  misc_feature 1..24: note = Synthetic construct
  source 1..24: mol_type = other DNA
ggagaccccgtcaacaactatgcc

SEQ ID NO: 5661 - DNA, 24 bp, synthetic construct
  misc_feature 1..24: note = Synthetic construct
  source 1..24: mol_type = other DNA
ggatacaccttcacttcctatgct

SEQ ID NO: 5662 - DNA, 24 bp, synthetic construct
  misc_feature 1..24: note = Synthetic construct
  source 1..24: mol_type = other DNA
ggatacagctttaccagctactgg

SEQ ID NO: 5663 - DNA, 24 bp, synthetic construct
  misc_feature 1..24: note = Synthetic construct
  source 1..24: mol_type = other DNA
ggatacagctttaccaactactgg

SEQ ID NO: 5664 - DNA, 24 bp, synthetic construct
  misc_feature 1..24: note = Synthetic construct
  source 1..24: mol_type = other DNA
ggatattactttagtcaatactgg

SEQ ID NO: 5665 - DNA, 24 bp, synthetic construct
  misc_feature 1..24: note = Synthetic construct
  source 1..24: mol_type = other DNA
ggcgacaggttaagcagtcactgg

SEQ ID NO: 5666 - DNA, 24 bp, synthetic construct
  misc_feature 1..24: note = Synthetic construct
  source 1..24: mol_type = other DNA
ggatataattttagtagctactgg

SEQ ID NO: 5667 - DNA, 24 bp, synthetic construct
  misc_feature 1..24: note = Synthetic construct
  source 1..24: mol_type = other DNA
ggatacagctttaccaaccactgg

SEQ ID NO: 5668 - DNA, 24 bp, synthetic construct
  misc_feature 1..24: note = Synthetic construct
  source 1..24: mol_type = other DNA
ggatacagcttttccagttactgg

SEQ ID NO: 5669 - DNA, 24 bp, synthetic construct
  misc_feature 1..24: note = Synthetic construct
  source 1..24: mol_type = other DNA
ggatacctctttggcagctattgg

SEQ ID NO: 5670 - DNA, 24 bp, synthetic construct
  misc_feature 1..24: note = Synthetic construct
  source 1..24: mol_type = other DNA
ggatacaggtttaccagttactgg

SEQ ID NO: 5671 - DNA, 24 bp, synthetic construct
  misc_feature 1..24: note = Synthetic construct
  source 1..24: mol_type = other DNA
ggatacagctttcccaattactgg

SEQ ID NO: 5672 - DNA, 24 bp, synthetic construct
  misc_feature 1..24: note = Synthetic construct
  source 1..24: mol_type = other DNA
ggatacatttttaccgattactgg

SEQ ID NO: 5673 - DNA, 24 bp, synthetic construct
  misc_feature 1..24: note = Synthetic construct
  source 1..24: mol_type = other DNA
ggatacagctttagcacatactgg

SEQ ID NO: 5674 - DNA, 24 bp, synthetic construct
  misc_feature 1..24: note = Synthetic construct
  source 1..24: mol_type = other DNA
ggatacagctttagtagatattgg

SEQ ID NO: 5675 - DNA, 24 bp, synthetic construct
  misc_feature 1..24: note = Synthetic construct
  source 1..24: mol_type = other DNA
ggatacagttttaccaattattgg

SEQ ID NO: 5676 - DNA, 24 bp, synthetic construct
  misc_feature 1..24: note = Synthetic construct
  source 1..24: mol_type = other DNA
ggatacacctttaccagcctctgg

SEQ ID NO: 5677 - DNA, 24 bp, synthetic construct
  misc_feature 1..24: note = Synthetic construct
  source 1..24: mol_type = other DNA
ggatatgactttaccgaccactgg

SEQ ID NO: 5678 - DNA, 24 bp, synthetic construct
  misc_feature 1..24: note = Synthetic construct
  source 1..24: mol_type = other DNA
ggatacagttttaccaagtactgg

SEQ ID NO: 5679 - DNA, 24 bp, synthetic construct
  misc_feature 1..24: note = Synthetic construct
  source 1..24: mol_type = other DNA
ggatacagctttaccacctactgg

SEQ ID NO: 5680 - DNA, 24 bp, synthetic construct
  misc_feature 1..24: note = Synthetic construct
  source 1..24: mol_type = other DNA
ggatacagttttaccagttactgg

SEQ ID NO: 5681 - DNA, 24 bp, synthetic construct
  misc_feature 1..24: note = Synthetic construct
  source 1..24: mol_type = other DNA
ggatatagctttcccaactactgg

SEQ ID NO: 5682 - DNA, 24 bp, synthetic construct
  misc_feature 1..24: note = Synthetic construct
  source 1..24: mol_type = other DNA
ggatacgactttagcagccactgg

SEQ ID NO: 5683 - DNA, 24 bp, synthetic construct
  misc_feature 1..24: note = Synthetic construct
  source 1..24: mol_type = other DNA
ggatacagtctcagtgattttggc

SEQ ID NO: 5684 - DNA, 24 bp, synthetic construct
  misc_feature 1..24: note = Synthetic construct
  source 1..24: mol_type = other DNA
ggaggcaccttcagcaagtatgat

SEQ ID NO: 5685 - DNA, 24 bp, synthetic construct
  misc_feature 1..24: note = Synthetic construct
  source 1..24: mol_type = other DNA
ggattcaccatcggtaattttgaa

SEQ ID NO: 5686 - DNA, 24 bp, synthetic construct
  misc_feature 1..24: note = Synthetic construct
  source 1..24: mol_type = other DNA
ggactcacctttagcacctttgcc

SEQ ID NO: 5687 - DNA, 24 bp, synthetic construct
  misc_feature 1..24: note = Synthetic construct
  source 1..24: mol_type = other DNA
ggactcaccttcagcagttctgaa

SEQ ID NO: 5688 - DNA, 24 bp, synthetic construct
  misc_feature 1..24: note = Synthetic construct
  source 1..24: mol_type = other DNA
ggattcactttcagtaacgcctgg

SEQ ID NO: 5689 - DNA, 24 bp, synthetic construct
  misc_feature 1..24: note = Synthetic construct
  source 1..24: mol_type = other DNA
ggattcagctttaaggactatgaa

SEQ ID NO: 5690 - DNA, 24 bp, synthetic construct
  misc_feature 1..24: note = Synthetic construct
  source 1..24: mol_type = other DNA
ggaatcaccttcagtagttatggc

SEQ ID NO: 5691 - DNA, 24 bp, synthetic construct
  misc_feature 1..24: note = Synthetic construct
  source 1..24: mol_type = other DNA
ggattcacctttagcgactatgcc

SEQ ID NO: 5692 - DNA, 24 bp, synthetic construct
  misc_feature 1..24: note = Synthetic construct
  source 1..24: mol_type = other DNA
ggattcaccttcagtagttatgaa

SEQ ID NO: 5693 - DNA, 24 bp, synthetic construct
  misc_feature 1..24: note = Synthetic construct
  source 1..24: mol_type = other DNA
ggattcacctttagcaactatgcc

SEQ ID NO: 5694 - DNA, 24 bp, synthetic construct
  misc_feature 1..24: note = Synthetic construct
  source 1..24: mol_type = other DNA
ggattcacttttagcaattatgcc

SEQ ID NO: 5695 - DNA, 24 bp, synthetic construct
  misc_feature 1..24: note = Synthetic construct
  source 1..24: mol_type = other DNA
gtattcaatttcagaagttatgaa

SEQ ID NO: 5696 - DNA, 24 bp, synthetic construct
  misc_feature 1..24: note = Synthetic construct
  source 1..24: mol_type = other DNA
ggattcaccttcagtacctataac

SEQ ID NO: 5697 - DNA, 24 bp, synthetic construct
  misc_feature 1..24: note = Synthetic construct
  source 1..24: mol_type = other DNA
ggattcaccttcagtgactataac

SEQ ID NO: 5698 - DNA, 24 bp, synthetic construct
  misc_feature 1..24: note = Synthetic construct
  source 1..24: mol_type = other DNA
ggattcaacttcagtagctatagc

SEQ ID NO: 5699 - DNA, 24 bp, synthetic construct
  misc_feature 1..24: note = Synthetic construct
  source 1..24: mol_type = other DNA
ggattcgccttcagtagctttagc

SEQ ID NO: 5700 - DNA, 24 bp, synthetic construct
  misc_feature 1..24: note = Synthetic construct
  source 1..24: mol_type = other DNA
ggattcagcttcagtaactatacc

SEQ ID NO: 5701 - DNA, 24 bp, synthetic construct
  misc_feature 1..24: note = Synthetic construct
  source 1..24: mol_type = other DNA
ggattcaacttcattagtcatacc

SEQ ID NO: 5702 - DNA, 24 bp, synthetic construct
  misc_feature 1..24: note = Synthetic construct
  source 1..24: mol_type = other DNA
ggattcatcctcagtagatttagc

SEQ ID NO: 5703 - DNA, 24 bp, synthetic construct
  misc_feature 1..24: note = Synthetic construct
  source 1..24: mol_type = other DNA
ggattcaccttcagttactatagc

SEQ ID NO: 5704 - DNA, 24 bp, synthetic construct
  misc_feature 1..24: note = Synthetic construct
  source 1..24: mol_type = other DNA
ggattcaccttcagtagctatagc

SEQ ID NO: 5705 - DNA, 24 bp, synthetic construct
  misc_feature 1..24: note = Synthetic construct
  source 1..24: mol_type = other DNA
ggtttcaccttcagcatgtacagt

SEQ ID NO: 5706 - DNA, 24 bp, synthetic construct
  misc_feature 1..24: note = Synthetic construct
  source 1..24: mol_type = other DNA
ggattcatcttcagtgattatgaa

SEQ ID NO: 5707 - DNA, 24 bp, synthetic construct
  misc_feature 1..24: note = Synthetic construct
  source 1..24: mol_type = other DNA
ggattcctcttcagaacttatgaa

SEQ ID NO: 5708 - DNA, 24 bp, synthetic construct
  misc_feature 1..24: note = Synthetic construct
  source 1..24: mol_type = other DNA
ggattcaccttcagtagtaatgaa

SEQ ID NO: 5709 - DNA, 24 bp, synthetic construct
  misc_feature 1..24: note = Synthetic construct
  source 1..24: mol_type = other DNA
ggattcagtttcaggagatatgac

SEQ ID NO: 5710 - DNA, 24 bp, synthetic construct
  misc_feature 1..24: note = Synthetic construct
  source 1..24: mol_type = other DNA
ggattcaacttcagtcattattcc

SEQ ID NO: 5711 - DNA, 24 bp, synthetic construct
  misc_feature 1..24: note = Synthetic construct
  source 1..24: mol_type = other DNA
ggattcaccttcagtagttttgaa

SEQ ID NO: 5712 - DNA, 24 bp, synthetic construct
  misc_feature 1..24: note = Synthetic construct
  source 1..24: mol_type = other DNA
ggattcaccttcagtagttatgag

SEQ ID NO: 5713 - DNA, 24 bp, synthetic construct
  misc_feature 1..24: note = Synthetic construct
  source 1..24: mol_type = other DNA
ggattcaccttcagtgattatgaa

SEQ ID NO: 5714 - DNA, 24 bp, synthetic construct
  misc_feature 1..24: note = Synthetic construct
  source 1..24: mol_type = other DNA
gagttcaccttcagtaattatgaa

SEQ ID NO: 5715 - DNA, 24 bp, synthetic construct
  misc_feature 1..24: note = Synthetic construct
  source 1..24: mol_type = other DNA
ggattcaccttcagtagttatacc

SEQ ID NO: 5716 - DNA, 24 bp, synthetic construct
  misc_feature 1..24: note = Synthetic construct
  source 1..24: mol_type = other DNA
ggattcagcttcagtgcctatagc

SEQ ID NO: 5717 - DNA, 24 bp, synthetic construct
  misc_feature 1..24: note = Synthetic construct
  source 1..24: mol_type = other DNA
ggcttctccttcggtgcttatggc

SEQ ID NO: 5718 - DNA, 24 bp, synthetic construct
  misc_feature 1..24: note = Synthetic construct
  source 1..24: mol_type = other DNA
ggaggcaccttcagcagttatgct

SEQ ID NO: 5719 - DNA, 24 bp, synthetic construct
  misc_feature 1..24: note = Synthetic construct
  source 1..24: mol_type = other DNA
ggattcagctttagtgactactac

SEQ ID NO: 5720 - DNA, 24 bp, synthetic construct
  misc_feature 1..24: note = Synthetic construct
  source 1..24: mol_type = other DNA
ggattcaccttcagtgactattct

SEQ ID NO: 5721 - DNA, 24 bp, synthetic construct
  misc_feature 1..24: note = Synthetic construct
  source 1..24: mol_type = other DNA
ggattcaccttcagcagcaatagc

SEQ ID NO: 5722 - DNA, 24 bp, synthetic construct
  misc_feature 1..24: note = Synthetic construct
  source 1..24: mol_type = other DNA
ggattcaccttcagtgcattctac

SEQ ID NO: 5723 - DNA, 24 bp, synthetic construct
  misc_feature 1..24: note = Synthetic construct
  source 1..24: mol_type = other DNA
ggattcatcttcagatcttatgca

SEQ ID NO: 5724 - DNA, 24 bp, synthetic construct
  misc_feature 1..24: note = Synthetic construct
  source 1..24: mol_type = other DNA
ggattcattttcaatacttatgaa

SEQ ID NO: 5725 - DNA, 24 bp, synthetic construct
  misc_feature 1..24: note = Synthetic construct
  source 1..24: mol_type = other DNA
ggattcaccttcaaaagttttgag

SEQ ID NO: 5726 - DNA, 24 bp, synthetic construct
  misc_feature 1..24: note = Synthetic construct
  source 1..24: mol_type = other DNA
ggattcaatttcactaacgcctgg

SEQ ID NO: 5727 - DNA, 24 bp, synthetic construct
  misc_feature 1..24: note = Synthetic construct
  source 1..24: mol_type = other DNA
ggattcaacttcagtagttatgaa

SEQ ID NO: 5728 - DNA, 24 bp, synthetic construct
  misc_feature 1..24: note = Synthetic construct
  source 1..24: mol_type = other DNA
ggattcacctttagtagttatagt

SEQ ID NO: 5729 - DNA, 24 bp, synthetic construct
  misc_feature 1..24: note = Synthetic construct
  source 1..24: mol_type = other DNA
ggatacaccttcactagctatgct

SEQ ID NO: 5730 - DNA, 24 bp, synthetic construct
  misc_feature 1..24: note = Synthetic construct
  source 1..24: mol_type = other DNA
ggatccaccttcactacctatgct

SEQ ID NO: 5731 - DNA, 24 bp, synthetic construct
  misc_feature 1..24: note = Synthetic construct
  source 1..24: mol_type = other DNA
ggatacagcttcaatatctatgct

SEQ ID NO: 5732 - DNA, 24 bp, synthetic construct
  misc_feature 1..24: note = Synthetic construct
  source 1..24: mol_type = other DNA
ggatacagcttcatcacatatgct

SEQ ID NO: 5733 - DNA, 24 bp, synthetic construct
  misc_feature 1..24: note = Synthetic construct
  source 1..24: mol_type = other DNA
ggatacaccttcactaattatgct

SEQ ID NO: 5734 - DNA, 24 bp, synthetic construct
  misc_feature 1..24: note = Synthetic construct
  source 1..24: mol_type = other DNA
ggattcacctttggcgattatggc

SEQ ID NO: 5735 - DNA, 24 bp, synthetic construct
  misc_feature 1..24: note = Synthetic construct
  source 1..24: mol_type = other DNA
ggattcagatttgatgattatgcc

SEQ ID NO: 5736 - DNA, 24 bp, synthetic construct
  misc_feature 1..24: note = Synthetic construct
  source 1..24: mol_type = other DNA
ggattcacctttagcagatatgcc

SEQ ID NO: 5737 - DNA, 24 bp, synthetic construct
  misc_feature 1..24: note = Synthetic construct
  source 1..24: mol_type = other DNA
ggattcacctttagcagctatgcc

SEQ ID NO: 5738 - DNA, 24 bp, synthetic construct
  misc_feature 1..24: note = Synthetic construct
  source 1..24: mol_type = other DNA
gcattcatctttggtgattatgct

SEQ ID NO: 5739 - DNA, 24 bp, synthetic construct
  misc_feature 1..24: note = Synthetic construct
  source 1..24: mol_type = other DNA
ggattcacctctggcacctatgcc

SEQ ID NO: 5740 - DNA, 24 bp, synthetic construct
  misc_feature 1..24: note = Synthetic construct
  source 1..24: mol_type = other DNA
caattcacctttggcgactatgcc

SEQ ID NO: 5741 - DNA, 24 bp, synthetic construct
  misc_feature 1..24: note = Synthetic construct
  source 1..24: mol_type = other DNA
ggaatcacttttagtaactattgg

SEQ ID NO: 5742 - DNA, 24 bp, synthetic construct
  misc_feature 1..24: note = Synthetic construct
  source 1..24: mol_type = other DNA
ggattcacctttagaagctatggc

SEQ ID NO: 5743 - DNA, 24 bp, synthetic construct
  misc_feature 1..24: note = Synthetic construct
  source 1..24: mol_type = other DNA
ggattcacgtttggcagttttgcc

SEQ ID NO: 5744 - DNA, 24 bp, synthetic construct
  misc_feature 1..24: note = Synthetic construct
  source 1..24: mol_type = other DNA
ggattcacatttaacaattatgcc

SEQ ID NO: 5745 - DNA, 24 bp, synthetic construct
  misc_feature 1..24: note = Synthetic construct
  source 1..24: mol_type = other DNA
ggattcatctttagtaactattgg

SEQ ID NO: 5746 - DNA, 24 bp, synthetic construct
  misc_feature 1..24: note = Synthetic construct
  source 1..24: mol_type = other DNA
ggattcacctttagaagcttttgg

SEQ ID NO: 5747 - DNA, 24 bp, synthetic construct
  misc_feature 1..24: note = Synthetic construct
  source 1..24: mol_type = other DNA
ggattcaccttcaatagttatgaa

SEQ ID NO: 5748 - DNA, 24 bp, synthetic construct
  misc_feature 1..24: note = Synthetic construct
  source 1..24: mol_type = other DNA
ggattcacttttgacgactatgct

SEQ ID NO: 5749 - DNA, 24 bp, synthetic construct
  misc_feature 1..24: note = Synthetic construct
  source 1..24: mol_type = other DNA
gaattcacttttggcgactatgcc

SEQ ID NO: 5750 - DNA, 24 bp, synthetic construct
  misc_feature 1..24: note = Synthetic construct
  source 1..24: mol_type = other DNA
ggattcagttttacttcgttttgg

SEQ ID NO: 5751 - DNA, 24 bp, synthetic construct
  misc_feature 1..24: note = Synthetic construct
  source 1..24: mol_type = other DNA
ggattcagttttgatgattatgcc

SEQ ID NO: 5752 - DNA, 24 bp, synthetic construct
  misc_feature 1..24: note = Synthetic construct
  source 1..24: mol_type = other DNA
ggattcaggtttggtgaacattac

SEQ ID NO: 5753 - DNA, 24 bp, synthetic construct
  misc_feature 1..24: note = Synthetic construct
  source 1..24: mol_type = other DNA
ggattcaccgtcactgaccaattc

SEQ ID NO: 5754 - DNA, 24 bp, synthetic construct
  misc_feature 1..24: note = Synthetic construct
  source 1..24: mol_type = other DNA
ggattcaccttcagtggttcctac

SEQ ID NO: 5755 - DNA, 24 bp, synthetic construct
  misc_feature 1..24: note = Synthetic construct
  source 1..24: mol_type = other DNA
ggattcaccttcggccgccatgcc

SEQ ID NO: 5756 - DNA, 24 bp, synthetic construct
  misc_feature 1..24: note = Synthetic construct
  source 1..24: mol_type = other DNA
ggattcatcttcaataactatgcc

SEQ ID NO: 5757 - DNA, 24 bp, synthetic construct
  misc_feature 1..24: note = Synthetic construct
  source 1..24: mol_type = other DNA
ggattcaccttcagtgactactac

SEQ ID NO: 5758 - DNA, 24 bp, synthetic construct
  misc_feature 1..24: note = Synthetic construct
  source 1..24: mol_type = other DNA
ggattcaccttcggagactacgac

SEQ ID NO: 5759 - DNA, 24 bp, synthetic construct
  misc_feature 1..24: note = Synthetic construct
  source 1..24: mol_type = other DNA
ggattcgacttcagtgactactac

SEQ ID NO: 5760 - DNA, 24 bp, synthetic construct
  misc_feature 1..24: note = Synthetic construct
  source 1..24: mol_type = other DNA
ggattcaccttcagggactactac

SEQ ID NO: 5761 - DNA, 24 bp, synthetic construct
  misc_feature 1..24: note = Synthetic construct
  source 1..24: mol_type = other DNA
ggattcaggtttgatgattatggc

SEQ ID NO: 5762 - DNA, 24 bp, synthetic construct
  misc_feature 1..24: note = Synthetic construct
  source 1..24: mol_type = other DNA
ggattcaccttcagcggtgattca

SEQ ID NO: 5763 - DNA, 24 bp, synthetic construct
  misc_feature 1..24: note = Synthetic construct
  source 1..24: mol_type = other DNA
ggattcacctttagcagctacgcc

SEQ ID NO: 5764 - DNA, 24 bp, synthetic construct
  misc_feature 1..24: note = Synthetic construct
  source 1..24: mol_type = other DNA
ggagtcaacgtcagtagcaactac

SEQ ID NO: 5765 - DNA, 24 bp, synthetic construct
  misc_feature 1..24: note = Synthetic construct
  source 1..24: mol_type = other DNA
ggattcactttcagaaacgcctgg

SEQ ID NO: 5766 - DNA, 24 bp, synthetic construct
  misc_feature 1..24: note = Synthetic construct
  source 1..24: mol_type = other DNA
ggattcacctttggggattttgct

SEQ ID NO: 5767 - DNA, 24 bp, synthetic construct
  misc_feature 1..24: note = Synthetic construct
  source 1..24: mol_type = other DNA
ggattcacctttggtgattatgct

SEQ ID NO: 5768 - DNA, 24 bp, synthetic construct
  misc_feature 1..24: note = Synthetic construct
  source 1..24: mol_type = other DNA
ggcttcatcgtcactagcaactac

SEQ ID NO: 5769 - DNA, 24 bp, synthetic construct
  misc_feature 1..24: note = Synthetic construct
  source 1..24: mol_type = other DNA
gggttcaccgtcactagcaactac

SEQ ID NO: 5770 - DNA, 24 bp, synthetic construct
  misc_feature 1..24: note = Synthetic construct
  source 1..24: mol_type = other DNA
ggattcacctttatcaactatccc

SEQ ID NO: 5771 - DNA, 24 bp, synthetic construct
  misc_feature 1..24: note = Synthetic construct
  source 1..24: mol_type = other DNA
ggattcacctttagcaactatggc

SEQ ID NO: 5772 - DNA, 24 bp, synthetic construct
  misc_feature 1..24: note = Synthetic construct
  source 1..24: mol_type = other DNA
ggattcacatttgacatctatgcc

SEQ ID NO: 5773 - DNA, 24 bp, synthetic construct
  misc_feature 1..24: note = Synthetic construct
  source 1..24: mol_type = other DNA
ggattcacctttgacaactatgcc

SEQ ID NO: 5774 - DNA, 24 bp, synthetic construct
  misc_feature 1..24: note = Synthetic construct
  source 1..24: mol_type = other DNA
ggattcggctttagcagctttgcc

SEQ ID NO: 5775 - DNA, 24 bp, synthetic construct
  misc_feature 1..24: note = Synthetic construct
  source 1..24: mol_type = other DNA
ggattcacctttagcacctatgcc

SEQ ID NO: 5776 - DNA, 24 bp, synthetic construct
  misc_feature 1..24: note = Synthetic construct
  source 1..24: mol_type = other DNA
gggttcaccgtcagtagcaactac

SEQ ID NO: 5777 - DNA, 24 bp, synthetic construct
  misc_feature 1..24: note = Synthetic construct
  source 1..24: mol_type = other DNA
gggttcaccgtcggtagcaactac

SEQ ID NO: 5778 - DNA, 24 bp, synthetic construct
  misc_feature 1..24: note = Synthetic construct
  source 1..24: mol_type = other DNA
ggattcaccttcagtggctatagc

SEQ ID NO: 5779 - DNA, 24 bp, synthetic construct
  misc_feature 1..24: note = Synthetic construct
  source 1..24: mol_type = other DNA
ggattcacctttagtacccattgg

SEQ ID NO: 5780 - DNA, 24 bp, synthetic construct
  misc_feature 1..24: note = Synthetic construct
  source 1..24: mol_type = other DNA
ggattcacctttagtgactattgg

SEQ ID NO: 5781 - DNA, 24 bp, synthetic construct
  misc_feature 1..24: note = Synthetic construct
  source 1..24: mol_type = other DNA
ggattcacctttagtagctattgg

SEQ ID NO: 5782 - DNA, 24 bp, synthetic construct
  misc_feature 1..24: note = Synthetic construct
  source 1..24: mol_type = other DNA
ggattcacctttagtttctattgg

SEQ ID NO: 5783 - DNA, 18 bp, synthetic construct
  misc_feature 1..18: note = Synthetic construct
  source 1..18: mol_type = other DNA
ggactcccccttggttgg

SEQ ID NO: 5784 - DNA, 24 bp, synthetic construct
  misc_feature 1..24: note = Synthetic construct
  source 1..24: mol_type = other DNA
ggattcactttcagtaaggcctgg

SEQ ID NO: 5785 - DNA, 24 bp, synthetic construct
  misc_feature 1..24: note = Synthetic construct
  source 1..24: mol_type = other DNA
ggtttcaaattcggtgattatgct

SEQ ID NO: 5786 - DNA, 24 bp, synthetic construct
  misc_feature 1..24: note = Synthetic construct
  source 1..24: mol_type = other DNA
ggattcacctttagcacctatggc

SEQ ID NO: 5787 - DNA, 24 bp, synthetic construct
  misc_feature 1..24: note = Synthetic construct
  source 1..24: mol_type = other DNA
ggattccactttagtagttattgg

SEQ ID NO: 5788 - DNA, 24 bp, synthetic construct
  misc_feature 1..24: note = Synthetic construct
  source 1..24: mol_type = other DNA
gggctcaccgtcaccagaacctac

SEQ ID NO: 5789 - DNA, 24 bp, synthetic construct
  misc_feature 1..24: note = Synthetic construct
  source 1..24: mol_type = other DNA
ggtttcacatttgggcactattgg

SEQ ID NO: 5790 - DNA, 24 bp, synthetic construct
  misc_feature 1..24: note = Synthetic construct
  source 1..24: mol_type = other DNA
ggattcaccttcagtgattactac

SEQ ID NO: 5791 - DNA, 24 bp, synthetic construct
  misc_feature 1..24: note = Synthetic construct
  source 1..24: mol_type = other DNA
gggttcacttttgatgatcatgca

SEQ ID NO: 5792 - DNA, 24 bp, synthetic construct
  misc_feature 1..24: note = Synthetic construct
  source 1..24: mol_type = other DNA
ggattcacctttagttcctactgg

SEQ ID NO: 5793 - DNA, 24 bp, synthetic construct
  misc_feature 1..24: note = Synthetic construct
  source 1..24: mol_type = other DNA
ggattcaccttcagtagttctgag

SEQ ID NO: 5794 - DNA, 24 bp, synthetic construct
  misc_feature 1..24: note = Synthetic construct
  source 1..24: mol_type = other DNA
ggattcacctttggtgactacact

SEQ ID NO: 5795 - DNA, 24 bp, synthetic construct
  misc_feature 1..24: note = Synthetic construct
  source 1..24: mol_type = other DNA
ggattcacctttaatatctttgcc

SEQ ID NO: 5796 - DNA, 24 bp, synthetic construct
  misc_feature 1..24: note = Synthetic construct
  source 1..24: mol_type = other DNA
ggattcacctttagaatctttgcc

SEQ ID NO: 5797 - DNA, 24 bp, synthetic construct
  misc_feature 1..24: note = Synthetic construct
  source 1..24: mol_type = other DNA
ggattcacctttagtagttattgg

SEQ ID NO: 5798 - DNA, 24 bp, synthetic construct
  misc_feature 1..24: note = Synthetic construct
  source 1..24: mol_type = other DNA
ggattcacctttagtggctattgg

SEQ ID NO: 5799 - DNA, 24 bp, synthetic construct
  misc_feature 1..24: note = Synthetic construct
  source 1..24: mol_type = other DNA
gcattcactttcagtaaggcctgg

SEQ ID NO: 5800 - DNA, 24 bp, synthetic construct
  misc_feature 1..24: note = Synthetic construct
  source 1..24: mol_type = other DNA
ggattcacttttagtagatattgg

SEQ ID NO: 5801 - DNA, 24 bp, synthetic construct
  misc_feature 1..24: note = Synthetic construct
  source 1..24: mol_type = other DNA
ggattcaccttcagtaattattgg

SEQ ID NO: 5802 - DNA, 24 bp, synthetic construct
  misc_feature 1..24: note = Synthetic construct
  source 1..24: mol_type = other DNA
ggattcattttcaaaaatgcctgg

SEQ ID NO: 5803 - DNA, 24 bp, synthetic construct
  misc_feature 1..24: note = Synthetic construct
  source 1..24: mol_type = other DNA
ggattcacttttaattcttattcc

SEQ ID NO: 5804 - DNA, 24 bp, synthetic construct
  misc_feature 1..24: note = Synthetic construct
  source 1..24: mol_type = other DNA
ggagacaccttctttaactatgtt

SEQ ID NO: 5805 - DNA, 24 bp, synthetic construct
  misc_feature 1..24: note = Synthetic construct
  source 1..24: mol_type = other DNA
ggattcacctttaacaattatggc

SEQ ID NO: 5806 - DNA, 24 bp, synthetic construct
  misc_feature 1..24: note = Synthetic construct
  source 1..24: mol_type = other DNA
ggattcacctttaacaattatgcc

SEQ ID NO: 5807 - DNA, 24 bp, synthetic construct
  misc_feature 1..24: note = Synthetic construct
  source 1..24: mol_type = other DNA
ggatttaccttcagtctctatgaa

SEQ ID NO: 5808 - DNA, 24 bp, synthetic construct
  misc_feature 1..24: note = Synthetic construct
  source 1..24: mol_type = other DNA
ggattcatcttcagtgactatggc

SEQ ID NO: 5809 - DNA, 24 bp, synthetic construct
  misc_feature 1..24: note = Synthetic construct
  source 1..24: mol_type = other DNA
ggattcaccttcagttactactgg

SEQ ID NO: 5810 - DNA, 24 bp, synthetic construct
  misc_feature 1..24: note = Synthetic construct
  source 1..24: mol_type = other DNA
gggttcaccttcagtgactacacc

SEQ ID NO: 5811 - DNA, 24 bp, synthetic construct
  misc_feature 1..24: note = Synthetic construct
  source 1..24: mol_type = other DNA
ggattcaccttcagtagctatgct

SEQ ID NO: 5812 - DNA, 24 bp, synthetic construct
  misc_feature 1..24: note = Synthetic construct
  source 1..24: mol_type = other DNA
ggattcaccttcagcgattatggc

SEQ ID NO: 5813 - DNA, 24 bp, synthetic construct
  misc_feature 1..24: note = Synthetic construct
  source 1..24: mol_type = other DNA
ggattcaccttcagtagttatggc

SEQ ID NO: 5814 - DNA, 14 bp, synthetic construct
  misc_feature 1..14: note = Synthetic construct
  source 1..14: mol_type = other DNA
gggggagttcggcc

SEQ ID NO: 5815 - DNA, 24 bp, synthetic construct
  misc_feature 1..24: note = Synthetic construct
  source 1..24: mol_type = other DNA
ggattcaccttcagcaaccatggc

SEQ ID NO: 5816 - DNA, 24 bp, synthetic construct
  misc_feature 1..24: note = Synthetic construct
  source 1..24: mol_type = other DNA
gcattcaccttcaatgcctacggc

SEQ ID NO: 5817 - DNA, 24 bp, synthetic construct
  misc_feature 1..24: note = Synthetic construct
  source 1..24: mol_type = other DNA
ggattctccttcagtagttatggc

SEQ ID NO: 5818 - DNA, 24 bp, synthetic construct
  misc_feature 1..24: note = Synthetic construct
  source 1..24: mol_type = other DNA
ggattcaccttcagcacctatgcc

SEQ ID NO: 5819 - DNA, 24 bp, synthetic construct
  misc_feature 1..24: note = Synthetic construct
  source 1..24: mol_type = other DNA
ggattcgtcttcagtagttatggc

SEQ ID NO: 5820 - DNA, 24 bp, synthetic construct
  misc_feature 1..24: note = Synthetic construct
  source 1..24: mol_type = other DNA
ggattcagtttcagtaactatggc

SEQ ID NO: 5821 - DNA, 24 bp, synthetic construct
  misc_feature 1..24: note = Synthetic construct
  source 1..24: mol_type = other DNA
ggattcaatttcacttcctatgcc

SEQ ID NO: 5822 - DNA, 24 bp, synthetic construct
  misc_feature 1..24: note = Synthetic construct
  source 1..24: mol_type = other DNA
ggattcagcttcagaagctatggc

SEQ ID NO: 5823 - DNA, 24 bp, synthetic construct
  misc_feature 1..24: note = Synthetic construct
  source 1..24: mol_type = other DNA
ggattcaccttcagttgctatggc

SEQ ID NO: 5824 - DNA, 18 bp, synthetic construct
  misc_feature 1..18: note = Synthetic construct
  source 1..18: mol_type = other DNA
accttcagtaactatggc

SEQ ID NO: 5825 - DNA, 24 bp, synthetic construct
  misc_feature 1..24: note = Synthetic construct
  source 1..24: mol_type = other DNA
ggattcaccttcaatagctatggc

SEQ ID NO: 5826 - DNA, 24 bp, synthetic construct
  misc_feature 1..24: note = Synthetic construct
  source 1..24: mol_type = other DNA
ggattcaccttcagcaactatggc

SEQ ID NO: 5827 - DNA, 24 bp, synthetic construct
  misc_feature 1..24: note = Synthetic construct
  source 1..24: mol_type = other DNA
ggactcgccttcagaaattatgtc

SEQ ID NO: 5828 - DNA, 24 bp, synthetic construct
  misc_feature 1..24: note = Synthetic construct
  source 1..24: mol_type = other DNA
ggattcgccttcagtagctttggc

SEQ ID NO: 5829 - DNA, 24 bp, synthetic construct
  misc_feature 1..24: note = Synthetic construct
  source 1..24: mol_type = other DNA
ggattcctgttcagtagctatgcc

SEQ ID NO: 5830 - DNA, 24 bp, synthetic construct
  misc_feature 1..24: note = Synthetic construct
  source 1..24: mol_type = other DNA
ggattcaccttcgacagttatggc

SEQ ID NO: 5831 - DNA, 24 bp, synthetic construct
  misc_feature 1..24: note = Synthetic construct
  source 1..24: mol_type = other DNA
ggattcaccttcaccacctatgcc

SEQ ID NO: 5832 - DNA, 24 bp, synthetic construct
  misc_feature 1..24: note = Synthetic construct
  source 1..24: mol_type = other DNA
ggattcaccttcagtaactatgac

SEQ ID NO: 5833 - DNA, 24 bp, synthetic construct
  misc_feature 1..24: note = Synthetic construct
  source 1..24: mol_type = other DNA
ggattccccctcagcaactacggc

SEQ ID NO: 5834 - DNA, 24 bp, synthetic construct
  misc_feature 1..24: note = Synthetic construct
  source 1..24: mol_type = other DNA
gggttcaccttcagtaaccatggc

SEQ ID NO: 5835 - DNA, 24 bp, synthetic construct
  misc_feature 1..24: note = Synthetic construct
  source 1..24: mol_type = other DNA
ggtttcacctttggcgcctatgac

SEQ ID NO: 5836 - DNA, 24 bp, synthetic construct
  misc_feature 1..24: note = Synthetic construct
  source 1..24: mol_type = other DNA
ggattcaccttcagtaactatggc

SEQ ID NO: 5837 - DNA, 24 bp, synthetic construct
  misc_feature 1..24: note = Synthetic construct
  source 1..24: mol_type = other DNA
gggttcagcttcagtggctctgct

SEQ ID NO: 5838 - DNA, 24 bp, synthetic construct
  misc_feature 1..24: note = Synthetic construct
  source 1..24: mol_type = other DNA
ggattcacctttgatgattatggc

SEQ ID NO: 5839 - DNA, 24 bp, synthetic construct
  misc_feature 1..24: note = Synthetic construct
  source 1..24: mol_type = other DNA
ggattcacctttgttgattttgcc

SEQ ID NO: 5840 - DNA, 24 bp, synthetic construct
  misc_feature 1..24: note = Synthetic construct
  source 1..24: mol_type = other DNA
ggattcagtcttgatgattatgcc

SEQ ID NO: 5841 - DNA, 24 bp, synthetic construct
  misc_feature 1..24: note = Synthetic construct
  source 1..24: mol_type = other DNA
ggattcacctttgatgattatgcc

SEQ ID NO: 5842 - DNA, 24 bp, synthetic construct
  misc_feature 1..24: note = Synthetic construct
  source 1..24: mol_type = other DNA
ggattcatctttgatgattatgcc

SEQ ID NO: 5843 - DNA, 24 bp, synthetic construct
  misc_feature 1..24: note = Synthetic construct
  source 1..24: mol_type = other DNA
ggattcacctttggtgattatgcc

SEQ ID NO: 5844 - DNA, 24 bp, synthetic construct
  misc_feature 1..24: note = Synthetic construct
  source 1..24: mol_type = other DNA
ggatttacttttaaagattttgcc

SEQ ID NO: 5845 - DNA, 24 bp, synthetic construct
  misc_feature 1..24: note = Synthetic construct
  source 1..24: mol_type = other DNA
ggatacaccttcacctcctaccac

SEQ ID NO: 5846 - DNA, 24 bp, synthetic construct
  misc_feature 1..24: note = Synthetic construct
  source 1..24: mol_type = other DNA
ggatacaccttcaccagctactat

SEQ ID NO: 5847 - DNA, 24 bp, synthetic construct
  misc_feature 1..24: note = Synthetic construct
  source 1..24: mol_type = other DNA
ggatacaccttcaccaggtactat

SEQ ID NO: 5848 - DNA, 24 bp, synthetic construct
  misc_feature 1..24: note = Synthetic construct
  source 1..24: mol_type = other DNA
ggttacaccttcacttcctacttc

SEQ ID NO: 5849 - DNA, 24 bp, synthetic construct
  misc_feature 1..24: note = Synthetic construct
  source 1..24: mol_type = other DNA
ggatacatcttcaccagcttcttt

SEQ ID NO: 5850 - DNA, 24 bp, synthetic construct
  misc_feature 1..24: note = Synthetic construct
  source 1..24: mol_type = other DNA
ggatacaccttcaccggctactat

SEQ ID NO: 5851 - DNA, 24 bp, synthetic construct
  misc_feature 1..24: note = Synthetic construct
  source 1..24: mol_type = other DNA
ggatacaccttcaatgcctactat

SEQ ID NO: 5852 - DNA, 24 bp, synthetic construct
  misc_feature 1..24: note = Synthetic construct
  source 1..24: mol_type = other DNA
ggatataccttcaccggctactat

SEQ ID NO: 5853 - DNA, 24 bp, synthetic construct
  misc_feature 1..24: note = Synthetic construct
  source 1..24: mol_type = other DNA
ggatacaccttcaccgactactat

SEQ ID NO: 5854 - DNA, 24 bp, synthetic construct
  misc_feature 1..24: note = Synthetic construct
  source 1..24: mol_type = other DNA
ggatacaattttaccacatatcac

SEQ ID NO: 5855 - DNA, 24 bp, synthetic construct
  misc_feature 1..24: note = Synthetic construct
  source 1..24: mol_type = other DNA
ggatacaccctcactgaattatcc

SEQ ID NO: 5856 - DNA, 24 bp, synthetic construct
  misc_feature 1..24: note = Synthetic construct
  source 1..24: mol_type = other DNA
ggatacaccttcagtatttatgct

SEQ ID NO: 5857 - DNA, 24 bp, synthetic construct
  misc_feature 1..24: note = Synthetic construct
  source 1..24: mol_type = other DNA
ggattcacctttactagctctgct

SEQ ID NO: 5858 - DNA, 24 bp, synthetic construct
  misc_feature 1..24: note = Synthetic construct
  source 1..24: mol_type = other DNA
ggatctaacttcaaaaactttggc

SEQ ID NO: 5859 - DNA, 24 bp, synthetic construct
  misc_feature 1..24: note = Synthetic construct
  source 1..24: mol_type = other DNA
ggatacaccttcactaggtatgct

SEQ ID NO: 5860 - DNA, 24 bp, synthetic construct
  misc_feature 1..24: note = Synthetic construct
  source 1..24: mol_type = other DNA
ggatacaccttcacaagctatgct

SEQ ID NO: 5861 - DNA, 24 bp, synthetic construct
  misc_feature 1..24: note = Synthetic construct
  source 1..24: mol_type = other DNA
ggatacaccttcattagttatgcc

SEQ ID NO: 5862 - DNA, 24 bp, synthetic construct
  misc_feature 1..24: note = Synthetic construct
  source 1..24: mol_type = other DNA
ggatacaccttcaccgaccacttc

SEQ ID NO: 5863 - DNA, 24 bp, synthetic construct
  misc_feature 1..24: note = Synthetic construct
  source 1..24: mol_type = other DNA
ggattcaccttcagtgcctataga

SEQ ID NO: 5864 - DNA, 24 bp, synthetic construct
  misc_feature 1..24: note = Synthetic construct
  source 1..24: mol_type = other DNA
ggattcaccttcagtgaccactac

SEQ ID NO: 5865 - DNA, 24 bp, synthetic construct
  misc_feature 1..24: note = Synthetic construct
  source 1..24: mol_type = other DNA
gggtttgccttcagccgctatggc

SEQ ID NO: 5866 - DNA, 24 bp, synthetic construct
  misc_feature 1..24: note = Synthetic construct
  source 1..24: mol_type = other DNA
ggattcaggtttggtgattatgcc

SEQ ID NO: 5867 - DNA, 24 bp, synthetic construct
  misc_feature 1..24: note = Synthetic construct
  source 1..24: mol_type = other DNA
gggttcaccgtcagcagctaccag

SEQ ID NO: 5868 - DNA, 24 bp, synthetic construct
  misc_feature 1..24: note = Synthetic construct
  source 1..24: mol_type = other DNA
ggattcatgtttggtagttatgcc

SEQ ID NO: 5869 - DNA, 24 bp, synthetic construct
  misc_feature 1..24: note = Synthetic construct
  source 1..24: mol_type = other DNA
ggattcaccttcaaagaccactat

SEQ ID NO: 5870 - DNA, 10 bp, synthetic construct
  misc_feature 1..10: note = Synthetic construct
  source 1..10: mol_type = other DNA
ggacacctac

SEQ ID NO: 5871 - DNA, 24 bp, synthetic construct
  misc_feature 1..24: note = Synthetic construct
  source 1..24: mol_type = other DNA
ggattcacctttagaaactattgg

SEQ ID NO: 5872 - DNA, 24 bp, synthetic construct
  misc_feature 1..24: note = Synthetic construct
  source 1..24: mol_type = other DNA
ggattcatctttggcaactatgcc

SEQ ID NO: 5873 - DNA, 24 bp, synthetic construct
  misc_feature 1..24: note = Synthetic construct
  source 1..24: mol_type = other DNA
ggattcaccttcagtacttatgag

SEQ ID NO: 5874 - DNA, 24 bp, synthetic construct
  misc_feature 1..24: note = Synthetic construct
  source 1..24: mol_type = other DNA
ggattcatcctcagtgactatagc

SEQ ID NO: 5875 - DNA, 24 bp, synthetic construct
  misc_feature 1..24: note = Synthetic construct
  source 1..24: mol_type = other DNA
ggattcaccttcagtaactactgg

SEQ ID NO: 5876 - DNA, 24 bp, synthetic construct
  misc_feature 1..24: note = Synthetic construct
  source 1..24: mol_type = other DNA
ggattcagcataagtttttatgcc

SEQ ID NO: 5877 - DNA, 24 bp, synthetic construct
  misc_feature 1..24: note = Synthetic construct
  source 1..24: mol_type = other DNA
ggattcaccgtcaatagcaactac

SEQ ID NO: 5878 - DNA, 24 bp, synthetic construct
  misc_feature 1..24: note = Synthetic construct
  source 1..24: mol_type = other DNA
ggattcgcctttgttaaatacacg

SEQ ID NO: 5879 - DNA, 24 bp, synthetic construct
  misc_feature 1..24: note = Synthetic construct
  source 1..24: mol_type = other DNA
ggattcacttttagtaactatgcc

SEQ ID NO: 5880 - DNA, 24 bp, synthetic construct
  misc_feature 1..24: note = Synthetic construct
  source 1..24: mol_type = other DNA
ggaggcaccttcaatagtcatact

SEQ ID NO: 5881 - DNA, 24 bp, synthetic construct
  misc_feature 1..24: note = Synthetic construct
  source 1..24: mol_type = other DNA
ggttacaccttcgacgagtatgat

SEQ ID NO: 5882 - DNA, 24 bp, synthetic construct
  misc_feature 1..24: note = Synthetic construct
  source 1..24: mol_type = other DNA
ggaggcaccttcgacaactatgct

SEQ ID NO: 5883 - DNA, 24 bp, synthetic construct
  misc_feature 1..24: note = Synthetic construct
  source 1..24: mol_type = other DNA
ggtctcaagtttgacaattcagca

SEQ ID NO: 5884 - DNA, 24 bp, synthetic construct
  misc_feature 1..24: note = Synthetic construct
  source 1..24: mol_type = other DNA
ggatacaccttcaccgactactcc

SEQ ID NO: 5885 - DNA, 24 bp, synthetic construct
  misc_feature 1..24: note = Synthetic construct
  source 1..24: mol_type = other DNA
ggatacaccttccccggccacttt

SEQ ID NO: 5886 - DNA, 24 bp, synthetic construct
  misc_feature 1..24: note = Synthetic construct
  source 1..24: mol_type = other DNA
ggatacaccttcaccggccactat

SEQ ID NO: 5887 - DNA, 24 bp, synthetic construct
  misc_feature 1..24: note = Synthetic construct
  source 1..24: mol_type = other DNA
ggatacaccttcagcgacttctac

SEQ ID NO: 5888 - DNA, 24 bp, synthetic construct
  misc_feature 1..24: note = Synthetic construct
  source 1..24: mol_type = other DNA
ggatacaccttcgccgcctactct

SEQ ID NO: 5889 - DNA, 24 bp, synthetic construct
  misc_feature 1..24: note = Synthetic construct
  source 1..24: mol_type = other DNA
ggatacacctttaccgcccactat

SEQ ID NO: 5890 - DNA, 24 bp, synthetic construct
  misc_feature 1..24: note = Synthetic construct
  source 1..24: mol_type = other DNA
ggacacaccttcattgactatgct

SEQ ID NO: 5891 - DNA, 24 bp, synthetic construct
  misc_feature 1..24: note = Synthetic construct
  source 1..24: mol_type = other DNA
ggattcacctttaacacctatgcc

SEQ ID NO: 5892 - DNA, 24 bp, synthetic construct
  misc_feature 1..24: note = Synthetic construct
  source 1..24: mol_type = other DNA
ggatactccttcacccccttctat

SEQ ID NO: 5893 - DNA, 24 bp, synthetic construct
  misc_feature 1..24: note = Synthetic construct
  source 1..24: mol_type = other DNA
ggatacagtttcgccagttatggc

SEQ ID NO: 5894 - DNA, 24 bp, synthetic construct
  misc_feature 1..24: note = Synthetic construct
  source 1..24: mol_type = other DNA
ggagggaccttcaggagtcactat

SEQ ID NO: 5895 - DNA, 24 bp, synthetic construct
  misc_feature 1..24: note = Synthetic construct
  source 1..24: mol_type = other DNA
ggagacgccttcagcagccatgct

SEQ ID NO: 5896 - DNA, 24 bp, synthetic construct
  misc_feature 1..24: note = Synthetic construct
  source 1..24: mol_type = other DNA
ggaggcaccctcagcgacttatct

SEQ ID NO: 5897 - DNA, 24 bp, synthetic construct
  misc_feature 1..24: note = Synthetic construct
  source 1..24: mol_type = other DNA
ggaggctccttcagcggctttggt

SEQ ID NO: 5898 - DNA, 24 bp, synthetic construct
  misc_feature 1..24: note = Synthetic construct
  source 1..24: mol_type = other DNA
ggattcaacttctattcctatacc

SEQ ID NO: 5899 - DNA, 24 bp, synthetic construct
  misc_feature 1..24: note = Synthetic construct
  source 1..24: mol_type = other DNA
ggattcaccttcagtaattatgaa

SEQ ID NO: 5900 - DNA, 24 bp, synthetic construct
  misc_feature 1..24: note = Synthetic construct
  source 1..24: mol_type = other DNA
ggattcacatttagttccttttgg

SEQ ID NO: 5901 - DNA, 24 bp, synthetic construct
  misc_feature 1..24: note = Synthetic construct
  source 1..24: mol_type = other DNA
ggattcactttttccatttatgcc

SEQ ID NO: 5902 - DNA, 24 bp, synthetic construct
  misc_feature 1..24: note = Synthetic construct
  source 1..24: mol_type = other DNA
ggattcacctttagttccttttgg

SEQ ID NO: 5903 - DNA, 24 bp, synthetic construct
  misc_feature 1..24: note = Synthetic construct
  source 1..24: mol_type = other DNA
ggattcaagtttggtgattatggt

SEQ ID NO: 5904 - DNA, 24 bp, synthetic construct
  misc_feature 1..24: note = Synthetic construct
  source 1..24: mol_type = other DNA
ggatttactttcgacaccgcctgg

SEQ ID NO: 5905 - DNA, 24 bp, synthetic construct
  misc_feature 1..24: note = Synthetic construct
  source 1..24: mol_type = other DNA
agatcctctttcagtgacgactgg

SEQ ID NO: 5906 - DNA, 24 bp, synthetic construct
  misc_feature 1..24: note = Synthetic construct
  source 1..24: mol_type = other DNA
gggttcatctttggtgattatgcg

SEQ ID NO: 5907 - DNA, 24 bp, synthetic construct
  misc_feature 1..24: note = Synthetic construct
  source 1..24: mol_type = other DNA
ggatacaccttcaccgaccactat

SEQ ID NO: 5908 - DNA, 24 bp, synthetic construct
  misc_feature 1..24: note = Synthetic construct
  source 1..24: mol_type = other DNA
ggattcacgttccgtaattatggc

SEQ ID NO: 5909 - DNA, 30 bp, synthetic construct
  misc_feature 1..30: note = Synthetic construct
  source 1..30: mol_type = other DNA
gaagtctctcaaaattctaatgcagcgggt

SEQ ID NO: 5910 - DNA, 24 bp, synthetic construct
  misc_feature 1..24: note = Synthetic construct
  source 1..24: mol_type = other DNA
ggttacacctttaccagttatagt

SEQ ID NO: 5911 - DNA, 24 bp, synthetic construct
  misc_feature 1..24: note = Synthetic construct
  source 1..24: mol_type = other DNA
ggattcacctttagttcgtatggc

SEQ ID NO: 5912 - DNA, 24 bp, synthetic construct
  misc_feature 1..24: note = Synthetic construct
  source 1..24: mol_type = other DNA
ggattcaccctcagaaattatgct

SEQ ID NO: 5913 - DNA, 24 bp, synthetic construct
  misc_feature 1..24: note = Synthetic construct
  source 1..24: mol_type = other DNA
ggatacaccctctccacctatgat

SEQ ID NO: 5914 - DNA, 24 bp, synthetic construct
  misc_feature 1..24: note = Synthetic construct
  source 1..24: mol_type = other DNA
ggaggcaccttcatcagttatagt

SEQ ID NO: 5915 - DNA, 24 bp, synthetic construct
  misc_feature 1..24: note = Synthetic construct
  source 1..24: mol_type = other DNA
ggaggcaccctcaccgactactct

SEQ ID NO: 5916 - DNA, 24 bp, synthetic construct
  misc_feature 1..24: note = Synthetic construct
  source 1..24: mol_type = other DNA
ggaggcaccctcagcacctatggt

SEQ ID NO: 5917 - DNA, 24 bp, synthetic construct
  misc_feature 1..24: note = Synthetic construct
  source 1..24: mol_type = other DNA
ggggggaacttcagcaggaccgtt

SEQ ID NO: 5918 - DNA, 30 bp, synthetic construct
  misc_feature 1..30: note = Synthetic construct
  source 1..30: mol_type = other DNA
gcgttctcactcagcaatgttaaaatgggt

SEQ ID NO: 5919 - DNA, 30 bp, synthetic construct
  misc_feature 1..30: note = Synthetic construct
  source 1..30: mol_type = other DNA
gggttctcactcagcactagtggaatgtgt

SEQ ID NO: 5920 - DNA, 24 bp, synthetic construct
  misc_feature 1..24: note = Synthetic construct
  source 1..24: mol_type = other DNA
ggggtctccgtcatcaacgatgca

SEQ ID NO: 5921 - DNA, 24 bp, synthetic construct
  misc_feature 1..24: note = Synthetic construct
  source 1..24: mol_type = other DNA
ggttacgccttaagtgattatggt

SEQ ID NO: 5922 - DNA, 24 bp, synthetic construct
  misc_feature 1..24: note = Synthetic construct
  source 1..24: mol_type = other DNA
ggatatagttttaccagttactgg

SEQ ID NO: 5923 - DNA, 24 bp, synthetic construct
  misc_feature 1..24: note = Synthetic construct
  source 1..24: mol_type = other DNA
ggatatagttttgcgacatactgg

SEQ ID NO: 5924 - DNA, 24 bp, synthetic construct
  misc_feature 1..24: note = Synthetic construct
  source 1..24: mol_type = other DNA
gctgcgtcattcagtggtaattac

SEQ ID NO: 5925 - DNA, 24 bp, synthetic construct
  misc_feature 1..24: note = Synthetic construct
  source 1..24: mol_type = other DNA
gggttcagcgtcagtgaccatcac

SEQ ID NO: 5926 - DNA, 24 bp, synthetic construct
  misc_feature 1..24: note = Synthetic construct
  source 1..24: mol_type = other DNA
ggattcatttttggtgattatgct

SEQ ID NO: 5927 - DNA, 30 bp, synthetic construct
  misc_feature 1..30: note = Synthetic construct
  source 1..30: mol_type = other DNA
gggttctcagtcagcaccagtggaatgtgt

SEQ ID NO: 5928 - DNA, 30 bp, synthetic construct
  misc_feature 1..30: note = Synthetic construct
  source 1..30: mol_type = other DNA
ggattctcactcagcactagtggaatgtgt

SEQ ID NO: 5929 - DNA, 30 bp, synthetic construct
  misc_feature 1..30: note = Synthetic construct
  source 1..30: mol_type = other DNA
gggttctcactcaccaatgctagaatgggt

SEQ ID NO: 5930 - DNA, 30 bp, synthetic construct
  misc_feature 1..30: note = Synthetic construct
  source 1..30: mol_type = other DNA
ggtttctcactcacgacatctggaatgtgt

SEQ ID NO: 5931 - DNA, 30 bp, synthetic construct
  misc_feature 1..30: note = Synthetic construct
  source 1..30: mol_type = other DNA
gggttctcactcaacactagtggaatgtgt

SEQ ID NO: 5932 - DNA, 30 bp, synthetic construct
  misc_feature 1..30: note = Synthetic construct
  source 1..30: mol_type = other DNA
ggcttctcactcagcgatcctagaatgggt

SEQ ID NO: 5933 - DNA, 24 bp, synthetic construct
  misc_feature 1..24: note = Synthetic construct
  source 1..24: mol_type = other DNA
gggttcaccttaagtgatcattct

SEQ ID NO: 5934 - DNA, 30 bp, synthetic construct
  misc_feature 1..30: note = Synthetic construct
  source 1..30: mol_type = other DNA
gggttctcactcaccactagaggaatgtgt

SEQ ID NO: 5935 - DNA, 24 bp, synthetic construct
  misc_feature 1..24: note = Synthetic construct
  source 1..24: mol_type = other DNA
ggattcactttttacaactacgcc

SEQ ID NO: 5936 - DNA, 30 bp, synthetic construct
  misc_feature 1..30: note = Synthetic construct
  source 1..30: mol_type = other DNA
gggttctcattcagtactagtggaatgtct

SEQ ID NO: 5937 - DNA, 30 bp, synthetic construct
  misc_feature 1..30: note = Synthetic construct
  source 1..30: mol_type = other DNA
ggggtctcactcgatagtagtggagtggct

SEQ ID NO: 5938 - DNA, 30 bp, synthetic construct
  misc_feature 1..30: note = Synthetic construct
  source 1..30: mol_type = other DNA
gggttctcactcagttctattggagaggct

SEQ ID NO: 5939 - DNA, 30 bp, synthetic construct
  misc_feature 1..30: note = Synthetic construct
  source 1..30: mol_type = other DNA
gggttctcactcaggactagtggagtgggt

SEQ ID NO: 5940 - DNA, 30 bp, synthetic construct
  misc_feature 1..30: note = Synthetic construct
  source 1..30: mol_type = other DNA
gggttctcactcagcactagtggagtgggt

SEQ ID NO: 5941 - DNA, 30 bp, synthetic construct
  misc_feature 1..30: note = Synthetic construct
  source 1..30: mol_type = other DNA
ggattctcattcaggtctagtgcagtgggt

SEQ ID NO: 5942 - DNA, 30 bp, synthetic construct
  misc_feature 1..30: note = Synthetic construct
  source 1..30: mol_type = other DNA
gggtcctcactcggtactagtggagcgggt

SEQ ID NO: 5943 - DNA, 30 bp, synthetic construct
  misc_feature 1..30: note = Synthetic construct
  source 1..30: mol_type = other DNA
gggttctcactcagcactcgtggagtgggt

SEQ ID NO: 5944 - DNA, 24 bp, synthetic construct
  misc_feature 1..24: note = Synthetic construct
  source 1..24: mol_type = other DNA
ggcttcacgtttagcagttatgcc

SEQ ID NO: 5945 - DNA, 24 bp, synthetic construct
  misc_feature 1..24: note = Synthetic construct
  source 1..24: mol_type = other DNA
ggattcatcctcagtagttttgag

SEQ ID NO: 5946 - DNA, 24 bp, synthetic construct
  misc_feature 1..24: note = Synthetic construct
  source 1..24: mol_type = other DNA
ggtggctccatcagtagtttctac

SEQ ID NO: 5947 - DNA, 30 bp, synthetic construct
  misc_feature 1..30: note = Synthetic construct
  source 1..30: mol_type = other DNA
ggggacagtgtctctagcaacagtgctgct

SEQ ID NO: 5948 - DNA, 30 bp, synthetic construct
  misc_feature 1..30: note = Synthetic construct
  source 1..30: mol_type = other DNA
ggtggctccgtcagcggtggtgattactcc

SEQ ID NO: 5949 - DNA, 24 bp, synthetic construct
  misc_feature 1..24: note = Synthetic construct
  source 1..24: mol_type = other DNA
ggtggctccatcagtactcaatac

SEQ ID NO: 5950 - DNA, 24 bp, synthetic construct
  misc_feature 1..24: note = Synthetic construct
  source 1..24: mol_type = other DNA
ggtgagtctttcagtgcttacttc

SEQ ID NO: 5951 - DNA, 24 bp, synthetic construct
  misc_feature 1..24: note = Synthetic construct
  source 1..24: mol_type = other DNA
ggtggctccatcagtacttactac

SEQ ID NO: 5952 - DNA, 24 bp, synthetic construct
  misc_feature 1..24: note = Synthetic construct
  source 1..24: mol_type = other DNA
ggtgactccatcactaataactac

SEQ ID NO: 5953 - DNA, 30 bp, synthetic construct
  misc_feature 1..30: note = Synthetic construct
  source 1..30: mol_type = other DNA
ggtgactccatcagcagtagtacttattac

SEQ ID NO: 5954 - DNA, 30 bp, synthetic construct
  misc_feature 1..30: note = Synthetic construct
  source 1..30: mol_type = other DNA
ggtgactccatgaacaggagtggttactac

SEQ ID NO: 5955 - DNA, 30 bp, synthetic construct
  misc_feature 1..30: note = Synthetic construct
  source 1..30: mol_type = other DNA
ggtggctccttcagcagtggtagttactac

SEQ ID NO: 5956 - DNA, 30 bp, synthetic construct
  misc_feature 1..30: note = Synthetic construct
  source 1..30: mol_type = other DNA
ggtggctccatcagcagtggtagttattac

SEQ ID NO: 5957 - DNA, 24 bp, synthetic construct
  misc_feature 1..24: note = Synthetic construct
  source 1..24: mol_type = other DNA
ggaggctccatcagtggctactac

SEQ ID NO: 5958 - DNA, 24 bp, synthetic construct
  misc_feature 1..24: note = Synthetic construct
  source 1..24: mol_type = other DNA
ggtgactccatcactagttactac

SEQ ID NO: 5959 - DNA, 24 bp, synthetic construct
  misc_feature 1..24: note = Synthetic construct
  source 1..24: mol_type = other DNA
ggggactccaccagaagttattat

SEQ ID NO: 5960 - DNA, 24 bp, synthetic construct
  misc_feature 1..24: note = Synthetic construct
  source 1..24: mol_type = other DNA
agtgtctccctgaatgattattat

SEQ ID NO: 5961 - DNA, 24 bp, synthetic construct
  misc_feature 1..24: note = Synthetic construct
  source 1..24: mol_type = other DNA
ggtgggtccttcagtggttactac

SEQ ID NO: 5962 - DNA, 24 bp, synthetic construct
  misc_feature 1..24: note = Synthetic construct
  source 1..24: mol_type = other DNA
ggtggctccatcaatacttactac

SEQ ID NO: 5963 - DNA, 24 bp, synthetic construct
  misc_feature 1..24: note = Synthetic construct
  source 1..24: mol_type = other DNA
ggtggctccatcagtagttactac

SEQ ID NO: 5964 - DNA, 24 bp, synthetic construct
  misc_feature 1..24: note = Synthetic construct
  source 1..24: mol_type = other DNA
ggtgactccatcagtacttactac

SEQ ID NO: 5965 - DNA, 24 bp, synthetic construct
  misc_feature 1..24: note = Synthetic construct
  source 1..24: mol_type = other DNA
ggtgcctccatcaattatttctac

SEQ ID NO: 5966 - DNA, 30 bp, synthetic construct
  misc_feature 1..30: note = Synthetic construct
  source 1..30: mol_type = other DNA
ggtgactcaatcagcagtggtttttatcac

SEQ ID NO: 5967 - DNA, 30 bp, synthetic construct
  misc_feature 1..30: note = Synthetic construct
  source 1..30: mol_type = other DNA
ggtggctccatcagcagtggtagttactac

SEQ ID NO: 5968 - DNA, 30 bp, synthetic construct
  misc_feature 1..30: note = Synthetic construct
  source 1..30: mol_type = other DNA
ggtggctccatcagcagtagtaactactac

SEQ ID NO: 5969 - DNA, 30 bp, synthetic construct
  misc_feature 1..30: note = Synthetic construct
  source 1..30: mol_type = other DNA
gggggctccatcaggggtgataattactac

SEQ ID NO: 5970 - DNA, 24 bp, synthetic construct
  misc_feature 1..24: note = Synthetic construct
  source 1..24: mol_type = other DNA
ggcgcctccatgactagttactac

SEQ ID NO: 5971 - DNA, 24 bp, synthetic construct
  misc_feature 1..24: note = Synthetic construct
  source 1..24: mol_type = other DNA
ggtggctccatgagtagttactac

SEQ ID NO: 5972 - DNA, 30 bp, synthetic construct
  misc_feature 1..30: note = Synthetic construct
  source 1..30: mol_type = other DNA
ggtggctccatcagcagtgggagtcactac

SEQ ID NO: 5973 - DNA, 30 bp, synthetic construct
  misc_feature 1..30: note = Synthetic construct
  source 1..30: mol_type = other DNA
ggtgcctctctcacgaacccgtctttttac

SEQ ID NO: 5974 - DNA, 24 bp, synthetic construct
  misc_feature 1..24: note = Synthetic construct
  source 1..24: mol_type = other DNA
ggtgattccttcagtgattactac

SEQ ID NO: 5975 - DNA, 24 bp, synthetic construct
  misc_feature 1..24: note = Synthetic construct
  source 1..24: mol_type = other DNA
ggtgggtccttcagaggtttcttc

SEQ ID NO: 5976 - DNA, 24 bp, synthetic construct
  misc_feature 1..24: note = Synthetic construct
  source 1..24: mol_type = other DNA
ggtgcgtccttcaacatttattct

SEQ ID NO: 5977 - DNA, 24 bp, synthetic construct
  misc_feature 1..24: note = Synthetic construct
  source 1..24: mol_type = other DNA
cgtgggtcgttaagtgctcactat

SEQ ID NO: 5978 - DNA, 24 bp, synthetic construct
  misc_feature 1..24: note = Synthetic construct
  source 1..24: mol_type = other DNA
ggtgggtccttcaatgattactac

SEQ ID NO: 5979 - DNA, 24 bp, synthetic construct
  misc_feature 1..24: note = Synthetic construct
  source 1..24: mol_type = other DNA
tatgggtccttcagtggttactcc

SEQ ID NO: 5980 - DNA, 24 bp, synthetic construct
  misc_feature 1..24: note = Synthetic construct
  source 1..24: mol_type = other DNA
cgtgggtccttcagagatcactac

SEQ ID NO: 5981 - DNA, 24 bp, synthetic construct
  misc_feature 1..24: note = Synthetic construct
  source 1..24: mol_type = other DNA
ggtgggtccttcagtggttacttc

SEQ ID NO: 5982 - DNA, 24 bp, synthetic construct
  misc_feature 1..24: note = Synthetic construct
  source 1..24: mol_type = other DNA
ggtggctccatcagcaacttctac

SEQ ID NO: 5983 - DNA, 30 bp, synthetic construct
  misc_feature 1..30: note = Synthetic construct
  source 1..30: mol_type = other DNA
ggtgactccatcagcagtggtggttactcc

SEQ ID NO: 5984 - DNA, 30 bp, synthetic construct
  misc_feature 1..30: note = Synthetic construct
  source 1..30: mol_type = other DNA
ggtggctccatcagcagtggtggttactcc

SEQ ID NO: 5985 - DNA, 30 bp, synthetic construct
  misc_feature 1..30: note = Synthetic construct
  source 1..30: mol_type = other DNA
ggtgactccgtcaacagtggtgcttactcc

SEQ ID NO: 5986 - DNA, 24 bp, synthetic construct
  misc_feature 1..24: note = Synthetic construct
  source 1..24: mol_type = other DNA
ggtggctccatcaggagtcactac

SEQ ID NO: 5987 - DNA, 24 bp, synthetic construct
  misc_feature 1..24: note = Synthetic construct
  source 1..24: mol_type = other DNA
ggtgactccatcagtggttaccac

SEQ ID NO: 5988 - DNA, 24 bp, synthetic construct
  misc_feature 1..24: note = Synthetic construct
  source 1..24: mol_type = other DNA
ggtggctccaccaggagttactac

SEQ ID NO: 5989 - DNA, 24 bp, synthetic construct
  misc_feature 1..24: note = Synthetic construct
  source 1..24: mol_type = other DNA
gatggctccatcaatagttactac

SEQ ID NO: 5990 - DNA, 24 bp, synthetic construct
  misc_feature 1..24: note = Synthetic construct
  source 1..24: mol_type = other DNA
ggtggctccatcagtggttactac

SEQ ID NO: 5991 - DNA, 24 bp, synthetic construct
  misc_feature 1..24: note = Synthetic construct
  source 1..24: mol_type = other DNA
ggtgactccatcagtaattactac

SEQ ID NO: 5992 - DNA, 30 bp, synthetic construct
  misc_feature 1..30: note = Synthetic construct
  source 1..30: mol_type = other DNA
ggtggctccatcaacagcggtaattactac

SEQ ID NO: 5993 - DNA, 30 bp, synthetic construct
  misc_feature 1..30: note = Synthetic construct
  source 1..30: mol_type = other DNA
ggtgactccgtcagcagtggtacttactcc

SEQ ID NO: 5994 - DNA, 30 bp, synthetic construct
  misc_feature 1..30: note = Synthetic construct
  source 1..30: mol_type = other DNA
ggtggctccatcagcagtggcagttactac

SEQ ID NO: 5995 - DNA, 30 bp, synthetic construct
  misc_feature 1..30: note = Synthetic construct
  source 1..30: mol_type = other DNA
ggtggctccatcagaagtgatagttcctac

SEQ ID NO: 5996 - DNA, 24 bp, synthetic construct
  misc_feature 1..24: note = Synthetic construct
  source 1..24: mol_type = other DNA
ggtggttccataagaaattattac

SEQ ID NO: 5997 - DNA, 24 bp, synthetic construct
  misc_feature 1..24: note = Synthetic construct
  source 1..24: mol_type = other DNA
ggcggccccagcgatagttcctac

SEQ ID NO: 5998 - DNA, 24 bp, synthetic construct
  misc_feature 1..24: note = Synthetic construct
  source 1..24: mol_type = other DNA
ggtgcctccatcagtcgttactat

SEQ ID NO: 5999 - DNA, 24 bp, synthetic construct
  misc_feature 1..24: note = Synthetic construct
  source 1..24: mol_type = other DNA
ggtggctccttcagtgattacgac

SEQ ID NO: 6000 - DNA, 24 bp, synthetic construct
  misc_feature 1..24: note = Synthetic construct
  source 1..24: mol_type = other DNA
ggtggctccatcagtacctactac

SEQ ID NO: 6001 - DNA, 24 bp, synthetic construct
  misc_feature 1..24: note = Synthetic construct
  source 1..24: mol_type = other DNA
ggtggctctattacttctaactac

SEQ ID NO: 6002 - DNA, 24 bp, synthetic construct
  misc_feature 1..24: note = Synthetic construct
  source 1..24: mol_type = other DNA
ggtgggtccttcagttcttactcc

SEQ ID NO: 6003 - DNA, 24 bp, synthetic construct
  misc_feature 1..24: note = Synthetic construct
  source 1..24: mol_type = other DNA
ggtgagtccttcattgggtactac

SEQ ID NO: 6004 - DNA, 24 bp, synthetic construct
  misc_feature 1..24: note = Synthetic construct
  source 1..24: mol_type = other DNA
ggtgggtccttcagtgattactac

SEQ ID NO: 6005 - DNA, 30 bp, synthetic construct
  misc_feature 1..30: note = Synthetic construct
  source 1..30: mol_type = other DNA
ggtgactccatcagtggtaatacttattcc

SEQ ID NO: 6006 - DNA, 24 bp, synthetic construct
  misc_feature 1..24: note = Synthetic construct
  source 1..24: mol_type = other DNA
ggtggctccatcagtaatcactac

SEQ ID NO: 6007 - DNA, 24 bp, synthetic construct
  misc_feature 1..24: note = Synthetic construct
  source 1..24: mol_type = other DNA
aatggctccgtcagcagtaacttc

SEQ ID NO: 6008 - DNA, 24 bp, synthetic construct
  misc_feature 1..24: note = Synthetic construct
  source 1..24: mol_type = other DNA
ggtggtgccttcagtgactactac

SEQ ID NO: 6009 - DNA, 24 bp, synthetic construct
  misc_feature 1..24: note = Synthetic construct
  source 1..24: mol_type = other DNA
ggtggctccatcagtgggtacttc

SEQ ID NO: 6010 - DNA, 30 bp, synthetic construct
  misc_feature 1..30: note = Synthetic construct
  source 1..30: mol_type = other DNA
ggtgcctccgtcaacactggtaatttctat

SEQ ID NO: 6011 - DNA, 27 bp, synthetic construct
  misc_feature 1..27: note = Synthetic construct
  source 1..27: mol_type = other DNA
ggtccctccatcaacagttcttactcc

SEQ ID NO: 6012 - DNA, 30 bp, synthetic construct
  misc_feature 1..30: note = Synthetic construct
  source 1..30: mol_type = other DNA
ggtggctccatcagggttgacacattctac

SEQ ID NO: 6013 - DNA, 30 bp, synthetic construct
  misc_feature 1..30: note = Synthetic construct
  source 1..30: mol_type = other DNA
ggtggctccatcagcagtagtagttactac

SEQ ID NO: 6014 - DNA, 30 bp, synthetic construct
  misc_feature 1..30: note = Synthetic construct
  source 1..30: mol_type = other DNA
ggtggctccatcagcagtagtaattactat

SEQ ID NO: 6015 - DNA, 30 bp, synthetic construct
  misc_feature 1..30: note = Synthetic construct
  source 1..30: mol_type = other DNA
ggtggctccatcagcggtactagtgactac

SEQ ID NO: 6016 - DNA, 30 bp, synthetic construct
  misc_feature 1..30: note = Synthetic construct
  source 1..30: mol_type = other DNA
ggtggctccatcagcagtaatagttactac

SEQ ID NO: 6017 - DNA, 30 bp, synthetic construct
  misc_feature 1..30: note = Synthetic construct
  source 1..30: mol_type = other DNA
ggtggctccatcagtagtagtacttactac

SEQ ID NO: 6018 - DNA, 30 bp, synthetic construct
  misc_feature 1..30: note = Synthetic construct
  source 1..30: mol_type = other DNA
ggtggctccatcagcagtagtacttactac

SEQ ID NO: 6019 - DNA, 24 bp, synthetic construct
  misc_feature 1..24: note = Synthetic construct
  source 1..24: mol_type = other DNA
ggtggctccatcactagttactac

SEQ ID NO: 6020 - DNA, 27 bp, synthetic construct
  misc_feature 1..27: note = Synthetic construct
  source 1..27: mol_type = other DNA
ggtttctccatcagaaatggttatttc

SEQ ID NO: 6021 - DNA, 27 bp, synthetic construct
  misc_feature 1..27: note = Synthetic construct
  source 1..27: mol_type = other DNA
ggttactccatcagtagtggttactac

SEQ ID NO: 6022 - DNA, 27 bp, synthetic construct
  misc_feature 1..27: note = Synthetic construct
  source 1..27: mol_type = other DNA
ggttatttcatcagtagtggtcattat

SEQ ID NO: 6023 - DNA, 27 bp, synthetic construct
  misc_feature 1..27: note = Synthetic construct
  source 1..27: mol_type = other DNA
ggttactccatgagcagaggttactac

SEQ ID NO: 6024 - DNA, 27 bp, synthetic construct
  misc_feature 1..27: note = Synthetic construct
  source 1..27: mol_type = other DNA
aattactccattagcagtggctcttac

SEQ ID NO: 6025 - DNA, 27 bp, synthetic construct
  misc_feature 1..27: note = Synthetic construct
  source 1..27: mol_type = other DNA
ggttactccatcagcagtggttactac

SEQ ID NO: 6026 - DNA, 27 bp, synthetic construct
  misc_feature 1..27: note = Synthetic construct
  source 1..27: mol_type = other DNA
ggttattccatcagtactggttactac

SEQ ID NO: 6027 - DNA, 27 bp, synthetic construct
  misc_feature 1..27: note = Synthetic construct
  source 1..27: mol_type = other DNA
ggttactccatcagcactggttactac

SEQ ID NO: 6028 - DNA, 27 bp, synthetic construct
  misc_feature 1..27: note = Synthetic construct
  source 1..27: mol_type = other DNA
gtttactccatccgtagtgcttactac

SEQ ID NO: 6029 - DNA, 27 bp, synthetic construct
  misc_feature 1..27: note = Synthetic construct
  source 1..27: mol_type = other DNA
ggttattccatcagcagtggttactac

SEQ ID NO: 6030 - DNA, 27 bp, synthetic construct
  misc_feature 1..27: note = Synthetic construct
  source 1..27: mol_type = other DNA
ggtttcttcatttccactggttaccac

SEQ ID NO: 6031 - DNA, 27 bp, synthetic construct
  misc_feature 1..27: note = Synthetic construct
  source 1..27: mol_type = other DNA
ggattctccatcaacagtgctcacctc

SEQ ID NO: 6032 - DNA, 30 bp, synthetic construct
  misc_feature 1..30: note = Synthetic construct
  source 1..30: mol_type = other DNA
ggtggctccatcagcagtaatagttactat

SEQ ID NO: 6033 - DNA, 27 bp, synthetic construct
  misc_feature 1..27: note = Synthetic construct
  source 1..27: mol_type = other DNA
ggtttctccatgagtgatagttactac

SEQ ID NO: 6034 - DNA, 27 bp, synthetic construct
  misc_feature 1..27: note = Synthetic construct
  source 1..27: mol_type = other DNA
ggttactacatcaggactggttactac

SEQ ID NO: 6035 - DNA, 27 bp, synthetic construct
  misc_feature 1..27: note = Synthetic construct
  source 1..27: mol_type = other DNA
ggtttctctctcatcggtggttaccac

SEQ ID NO: 6036 - DNA, 24 bp, synthetic construct
  misc_feature 1..24: note = Synthetic construct
  source 1..24: mol_type = other DNA
ggaggcaccttcagcaggtatgct

SEQ ID NO: 6037 - DNA, 24 bp, synthetic construct
  misc_feature 1..24: note = Synthetic construct
  source 1..24: mol_type = other DNA
ggaggcactttcatcaacaatgtt

SEQ ID NO: 6038 - DNA, 24 bp, synthetic construct
  misc_feature 1..24: note = Synthetic construct
  source 1..24: mol_type = other DNA
gagggcaccctcaccaagtttgct

SEQ ID NO: 6039 - DNA, 24 bp, synthetic construct
  misc_feature 1..24: note = Synthetic construct
  source 1..24: mol_type = other DNA
ggagcctccttcagcaatcatgct

SEQ ID NO: 6040 - DNA, 24 bp, synthetic construct
  misc_feature 1..24: note = Synthetic construct
  source 1..24: mol_type = other DNA
gatggcgcctttagcacccatgct

SEQ ID NO: 6041 - DNA, 24 bp, synthetic construct
  misc_feature 1..24: note = Synthetic construct
  source 1..24: mol_type = other DNA
ggactcatcttcagtgccgttggc

SEQ ID NO: 6042 - DNA, 24 bp, synthetic construct
  misc_feature 1..24: note = Synthetic construct
  source 1..24: mol_type = other DNA
ggattcaccttcagtgactacacc

SEQ ID NO: 6043 - DNA, 24 bp, synthetic construct
  misc_feature 1..24: note = Synthetic construct
  source 1..24: mol_type = other DNA
gggctcacctttagtacttctgaa

SEQ ID NO: 6044 - DNA, 24 bp, synthetic construct
  misc_feature 1..24: note = Synthetic construct
  source 1..24: mol_type = other DNA
ggattcacgttcggcgaccactac

SEQ ID NO: 6045 - DNA, 24 bp, synthetic construct
  misc_feature 1..24: note = Synthetic construct
  source 1..24: mol_type = other DNA
ggattcatctttgatgattttggc

SEQ ID NO: 6046 - DNA, 24 bp, synthetic construct
  misc_feature 1..24: note = Synthetic construct
  source 1..24: mol_type = other DNA
ggattcagcatcagtgactactcg

SEQ ID NO: 6047 - DNA, 24 bp, synthetic construct
  misc_feature 1..24: note = Synthetic construct
  source 1..24: mol_type = other DNA
ggattcacgttaaatacctatggc

SEQ ID NO: 6048 - DNA, 24 bp, synthetic construct
  misc_feature 1..24: note = Synthetic construct
  source 1..24: mol_type = other DNA
ggatacaacttcctcggccactat

SEQ ID NO: 6049 - DNA, 24 bp, synthetic construct
  misc_feature 1..24: note = Synthetic construct
  source 1..24: mol_type = other DNA
ggatacaccctcaccggaatatcc

SEQ ID NO: 6050 - DNA, 30 bp, synthetic construct
  misc_feature 1..30: note = Synthetic construct
  source 1..30: mol_type = other DNA
gggttcccactgaccaccgaaaaagtgggt

SEQ ID NO: 6051 - DNA, 24 bp, synthetic construct
  misc_feature 1..24: note = Synthetic construct
  source 1..24: mol_type = other DNA
ggaggcaccttcagcggctatggc

SEQ ID NO: 6052 - DNA, 24 bp, synthetic construct
  misc_feature 1..24: note = Synthetic construct
  source 1..24: mol_type = other DNA
ggattcaccttcaggagctatggc

SEQ ID NO: 6053 - DNA, 21 bp, synthetic construct
  misc_feature 1..21: note = Synthetic construct
  source 1..21: mol_type = other DNA
atcaatcatagtggaagcacc

SEQ ID NO: 6054 - DNA, 24 bp, synthetic construct
  misc_feature 1..24: note = Synthetic construct
  source 1..24: mol_type = other DNA
agcatccctatgtatgaaacaaca

SEQ ID NO: 6055 - DNA, 21 bp, synthetic construct
  misc_feature 1..21: note = Synthetic construct
  source 1..21: mol_type = other DNA
attcaaagcggtgggaccacc

SEQ ID NO: 6056 - DNA, 24 bp, synthetic construct
  misc_feature 1..24: note = Synthetic construct
  source 1..24: mol_type = other DNA
atcagcggtcataatggtaacaca

SEQ ID NO: 6057 - DNA, 24 bp, synthetic construct
  misc_feature 1..24: note = Synthetic construct
  source 1..24: mol_type = other DNA
atcaaccctactggtgctaccaca

SEQ ID NO: 6058 - DNA, 24 bp, synthetic construct
  misc_feature 1..24: note = Synthetic construct
  source 1..24: mol_type = other DNA
atcatccctctgtttgattcacca

SEQ ID NO: 6059 - DNA, 30 bp, synthetic construct
  misc_feature 1..30: note = Synthetic construct
  source 1..30: mol_type = other DNA
attcgaaccaagactttcaattacgcgaca

SEQ ID NO: 6060 - DNA, 24 bp, synthetic construct
  misc_feature 1..24: note = Synthetic construct
  source 1..24: mol_type = other DNA
atatcatatgatggaaatgataaa

SEQ ID NO: 6061 - DNA, 24 bp, synthetic construct
  misc_feature 1..24: note = Synthetic construct
  source 1..24: mol_type = other DNA
atatcgtatgatggaagcaatata

SEQ ID NO: 6062 - DNA, 30 bp, synthetic construct
  misc_feature 1..30: note = Synthetic construct
  source 1..30: mol_type = other DNA
attagaagcagttctaacaaatatgcgaca

SEQ ID NO: 6063 - DNA, 30 bp, synthetic construct
  misc_feature 1..30: note = Synthetic construct
  source 1..30: mol_type = other DNA
accagaagtaaggcaaacaatttcgcgaca

SEQ ID NO: 6064 - DNA, 30 bp, synthetic construct
  misc_feature 1..30: note = Synthetic construct
  source 1..30: mol_type = other DNA
attaaaagcaaaagtaacaactatgcgaca

SEQ ID NO: 6065 - DNA, 24 bp, synthetic construct
  misc_feature 1..24: note = Synthetic construct
  source 1..24: mol_type = other DNA
gttggtcctaaacctggtgaaaca

SEQ ID NO: 6066 - DNA, 24 bp, synthetic construct
  misc_feature 1..24: note = Synthetic construct
  source 1..24: mol_type = other DNA
ttcaaccctagtgccgataccaaa

SEQ ID NO: 6067 - DNA, 24 bp, synthetic construct
  misc_feature 1..24: note = Synthetic construct
  source 1..24: mol_type = other DNA
atcaaccctgacagtggtgacaca

SEQ ID NO: 6068 - DNA, 24 bp, synthetic construct
  misc_feature 1..24: note = Synthetic construct
  source 1..24: mol_type = other DNA
atcaaccctaacagtggtgtcaca

SEQ ID NO: 6069 - DNA, 24 bp, synthetic construct
  misc_feature 1..24: note = Synthetic construct
  source 1..24: mol_type = other DNA
atcaacaccgaccttgggacccca

SEQ ID NO: 6070 - DNA, 24 bp, synthetic construct
  misc_feature 1..24: note = Synthetic construct
  source 1..24: mol_type = other DNA
atcaaccctagcactggtggctca

SEQ ID NO: 6071 - DNA, 24 bp, synthetic construct
  misc_feature 1..24: note = Synthetic construct
  source 1..24: mol_type = other DNA
tacactcccaacggtggcagtaca

SEQ ID NO: 6072 - DNA, 24 bp, synthetic construct
  misc_feature 1..24: note = Synthetic construct
  source 1..24: mol_type = other DNA
atcaacaagtataatggtgacaag

SEQ ID NO: 6073 - DNA, 24 bp, synthetic construct
  misc_feature 1..24: note = Synthetic construct
  source 1..24: mol_type = other DNA
atcgaccctcacagtggtgccaca

SEQ ID NO: 6074 - DNA, 24 bp, synthetic construct
  misc_feature 1..24: note = Synthetic construct
  source 1..24: mol_type = other DNA
atcaacgctggcaatggttacaca

SEQ ID NO: 6075 - DNA, 24 bp, synthetic construct
  misc_feature 1..24: note = Synthetic construct
  source 1..24: mol_type = other DNA
atcaaccctggcaacggtaacaca

SEQ ID NO: 6076 - DNA, 24 bp, synthetic construct
  misc_feature 1..24: note = Synthetic construct
  source 1..24: mol_type = other DNA
atcaacgctggcaatggtaacaca

SEQ ID NO: 6077 - DNA, 24 bp, synthetic construct
  misc_feature 1..24: note = Synthetic construct
  source 1..24: mol_type = other DNA
atcaaccctaacagtggtagcaca

SEQ ID NO: 6078 - DNA, 24 bp, synthetic construct
  misc_feature 1..24: note = Synthetic construct
  source 1..24: mol_type = other DNA
gtggatcctcaagatggtgaaaga

SEQ ID NO: 6079 - DNA, 24 bp, synthetic construct
  misc_feature 1..24: note = Synthetic construct
  source 1..24: mol_type = other DNA
gttgatcctgaggatggtaaaacg

SEQ ID NO: 6080 - DNA, 24 bp, synthetic construct
  misc_feature 1..24: note = Synthetic construct
  source 1..24: mol_type = other DNA
atcaacgctggcaatggtgacaca

SEQ ID NO: 6081 - DNA, 24 bp, synthetic construct
  misc_feature 1..24: note = Synthetic construct
  source 1..24: mol_type = other DNA
gtgaaccctgacagtggtgccaca

SEQ ID NO: 6082 - DNA, 24 bp, synthetic construct
  misc_feature 1..24: note = Synthetic construct
  source 1..24: mol_type = other DNA
atgaaccctaacagtggtaacaca

SEQ ID NO: 6083 - DNA, 24 bp, synthetic construct
  misc_feature 1..24: note = Synthetic construct
  source 1..24: mol_type = other DNA
atgaaccctaatagtggtaacaca

SEQ ID NO: 6084 - DNA, 24 bp, synthetic construct
  misc_feature 1..24: note = Synthetic construct
  source 1..24: mol_type = other DNA
atgaaccctaaaagtggtaacaca

SEQ ID NO: 6085 - DNA, 24 bp, synthetic construct
  misc_feature 1..24: note = Synthetic construct
  source 1..24: mol_type = other DNA
atgaaccctaagagtggtgacaca

SEQ ID NO: 6086 - DNA, 24 bp, synthetic construct
  misc_feature 1..24: note = Synthetic construct
  source 1..24: mol_type = other DNA
atcatccctatccttggcacatca

SEQ ID NO: 6087 - DNA, 24 bp, synthetic construct
  misc_feature 1..24: note = Synthetic construct
  source 1..24: mol_type = other DNA
attgttccgatgtttggaacaact

SEQ ID NO: 6088 - DNA, 24 bp, synthetic construct
  misc_feature 1..24: note = Synthetic construct
  source 1..24: mol_type = other DNA
atcagcgctgacaatggtaacaca

SEQ ID NO: 6089 - DNA, 24 bp, synthetic construct
  misc_feature 1..24: note = Synthetic construct
  source 1..24: mol_type = other DNA
atcatccctatctttgctacagca

SEQ ID NO: 6090 - DNA, 24 bp, synthetic construct
  misc_feature 1..24: note = Synthetic construct
  source 1..24: mol_type = other DNA
atgaaccctgccagtggtaacaca

SEQ ID NO: 6091 - DNA, 24 bp, synthetic construct
  misc_feature 1..24: note = Synthetic construct
  source 1..24: mol_type = other DNA
atcaaccccaacagtggaaagcca

SEQ ID NO: 6092 - DNA, 18 bp, synthetic construct
  misc_feature 1..18: note = Synthetic construct
  source 1..18: mol_type = other DNA
atcttctttcaaacaccc

SEQ ID NO: 6093 - DNA, 24 bp, synthetic construct
  misc_feature 1..24: note = Synthetic construct
  source 1..24: mol_type = other DNA
atcatccccagctttggaacagcg

SEQ ID NO: 6094 - DNA, 24 bp, synthetic construct
  misc_feature 1..24: note = Synthetic construct
  source 1..24: mol_type = other DNA
atcatccctatctttggtacagca

SEQ ID NO: 6095 - DNA, 24 bp, synthetic construct
  misc_feature 1..24: note = Synthetic construct
  source 1..24: mol_type = other DNA
atcagcgcttccactgcgaacaca

SEQ ID NO: 6096 - DNA, 24 bp, synthetic construct
  misc_feature 1..24: note = Synthetic construct
  source 1..24: mol_type = other DNA
atcagcggtaataatgataacaca

SEQ ID NO: 6097 - DNA, 24 bp, synthetic construct
  misc_feature 1..24: note = Synthetic construct
  source 1..24: mol_type = other DNA
atcatccctttccttgctagagca

SEQ ID NO: 6098 - DNA, 24 bp, synthetic construct
  misc_feature 1..24: note = Synthetic construct
  source 1..24: mol_type = other DNA
atccgcgctgacattggtgacaca

SEQ ID NO: 6099 - DNA, 24 bp, synthetic construct
  misc_feature 1..24: note = Synthetic construct
  source 1..24: mol_type = other DNA
atcagcctttacaatggtgccaca

SEQ ID NO: 6100 - DNA, 24 bp, synthetic construct
  misc_feature 1..24: note = Synthetic construct
  source 1..24: mol_type = other DNA
ttcatccccatttttggcacaacg

SEQ ID NO: 6101 - DNA, 24 bp, synthetic construct
  misc_feature 1..24: note = Synthetic construct
  source 1..24: mol_type = other DNA
gtgctgccactgttcggagtcacc

SEQ ID NO: 6102 - DNA, 24 bp, synthetic construct
  misc_feature 1..24: note = Synthetic construct
  source 1..24: mol_type = other DNA
gtcatccctatgtttggtgcaaca

SEQ ID NO: 6103 - DNA, 24 bp, synthetic construct
  misc_feature 1..24: note = Synthetic construct
  source 1..24: mol_type = other DNA
atcaactcttacaatggtaacaca

SEQ ID NO: 6104 - DNA, 24 bp, synthetic construct
  misc_feature 1..24: note = Synthetic construct
  source 1..24: mol_type = other DNA
ctcacccctatttttggaactgct

SEQ ID NO: 6105 - DNA, 24 bp, synthetic construct
  misc_feature 1..24: note = Synthetic construct
  source 1..24: mol_type = other DNA
atcatccctctctttggtacaaca

SEQ ID NO: 6106 - DNA, 24 bp, synthetic construct
  misc_feature 1..24: note = Synthetic construct
  source 1..24: mol_type = other DNA
atcatccctctctttggttcagga

SEQ ID NO: 6107 - DNA, 24 bp, synthetic construct
  misc_feature 1..24: note = Synthetic construct
  source 1..24: mol_type = other DNA
atcatccctatctttggtacaaca

SEQ ID NO: 6108 - DNA, 24 bp, synthetic construct
  misc_feature 1..24: note = Synthetic construct
  source 1..24: mol_type = other DNA
atcatcgctgtctttggtacacca

SEQ ID NO: 6109 - DNA, 24 bp, synthetic construct
  misc_feature 1..24: note = Synthetic construct
  source 1..24: mol_type = other DNA
atcatccctatgtctggtacagcc

SEQ ID NO: 6110 - DNA, 24 bp, synthetic construct
  misc_feature 1..24: note = Synthetic construct
  source 1..24: mol_type = other DNA
atcagcgcttacaatggtgacaca

SEQ ID NO: 6111 - DNA, 21 bp, synthetic construct
  misc_feature 1..21: note = Synthetic construct
  source 1..21: mol_type = other DNA
atcagctacaatggtaatata

SEQ ID NO: 6112 - DNA, 24 bp, synthetic construct
  misc_feature 1..24: note = Synthetic construct
  source 1..24: mol_type = other DNA
atcagcgcttacaatggtaacaca

SEQ ID NO: 6113 - DNA, 24 bp, synthetic construct
  misc_feature 1..24: note = Synthetic construct
  source 1..24: mol_type = other DNA
atcaacacttactatggtcacaca

SEQ ID NO: 6114 - DNA, 24 bp, synthetic construct
  misc_feature 1..24: note = Synthetic construct
  source 1..24: mol_type = other DNA
atcatccctctctttggtgcacca

SEQ ID NO: 6115 - DNA, 24 bp, synthetic construct
  misc_feature 1..24: note = Synthetic construct
  source 1..24: mol_type = other DNA
atcatctgtatctctgaagcacca

SEQ ID NO: 6116 - DNA, 24 bp, synthetic construct
  misc_feature 1..24: note = Synthetic construct
  source 1..24: mol_type = other DNA
atcatccctatctttgctacaaca

SEQ ID NO: 6117 - DNA, 24 bp, synthetic construct
  misc_feature 1..24: note = Synthetic construct
  source 1..24: mol_type = other DNA
attagcggtgacaatggcaacaca

SEQ ID NO: 6118 - DNA, 24 bp, synthetic construct
  misc_feature 1..24: note = Synthetic construct
  source 1..24: mol_type = other DNA
atcatcccgatctttggtacggtg

SEQ ID NO: 6119 - DNA, 24 bp, synthetic construct
  misc_feature 1..24: note = Synthetic construct
  source 1..24: mol_type = other DNA
atcatccctatccatggtacagtg

SEQ ID NO: 6120 - DNA, 24 bp, synthetic construct
  misc_feature 1..24: note = Synthetic construct
  source 1..24: mol_type = other DNA
ataagcgcttacgacgggcgcaca

SEQ ID NO: 6121 - DNA, 24 bp, synthetic construct
  misc_feature 1..24: note = Synthetic construct
  source 1..24: mol_type = other DNA
atcatccccatctttggaacaaca

SEQ ID NO: 6122 - DNA, 24 bp, synthetic construct
  misc_feature 1..24: note = Synthetic construct
  source 1..24: mol_type = other DNA
atccgcccttacaatggtcagaca

SEQ ID NO: 6123 - DNA, 24 bp, synthetic construct
  misc_feature 1..24: note = Synthetic construct
  source 1..24: mol_type = other DNA
ataaccacttacaatggtaacaca

SEQ ID NO: 6124 - DNA, 24 bp, synthetic construct
  misc_feature 1..24: note = Synthetic construct
  source 1..24: mol_type = other DNA
atcatccctatctttggtactcca

SEQ ID NO: 6125 - DNA, 24 bp, synthetic construct
  misc_feature 1..24: note = Synthetic construct
  source 1..24: mol_type = other DNA
atgaacaccaacactgggcagcca

SEQ ID NO: 6126 - DNA, 24 bp, synthetic construct
  misc_feature 1..24: note = Synthetic construct
  source 1..24: mol_type = other DNA
attgatcccgagaatggtgaaaca

SEQ ID NO: 6127 - DNA, 24 bp, synthetic construct
  misc_feature 1..24: note = Synthetic construct
  source 1..24: mol_type = other DNA
atttcatttggtgggagtgatcaa

SEQ ID NO: 6128 - DNA, 24 bp, synthetic construct
  misc_feature 1..24: note = Synthetic construct
  source 1..24: mol_type = other DNA
attgatcctgaagatggagaaaca

SEQ ID NO: 6129 - DNA, 24 bp, synthetic construct
  misc_feature 1..24: note = Synthetic construct
  source 1..24: mol_type = other DNA
atcatcccaagttttggagcagca

SEQ ID NO: 6130 - DNA, 24 bp, synthetic construct
  misc_feature 1..24: note = Synthetic construct
  source 1..24: mol_type = other DNA
atcaaccccactggtagaagcaca

SEQ ID NO: 6131 - DNA, 24 bp, synthetic construct
  misc_feature 1..24: note = Synthetic construct
  source 1..24: mol_type = other DNA
atcaaccctaacagtggtgacaca

SEQ ID NO: 6132 - DNA, 24 bp, synthetic construct
  misc_feature 1..24: note = Synthetic construct
  source 1..24: mol_type = other DNA
atcaaccctaacgatggagacaca

SEQ ID NO: 6133 - DNA, 24 bp, synthetic construct
  misc_feature 1..24: note = Synthetic construct
  source 1..24: mol_type = other DNA
ttggatcctgacgacggtgaaaca

SEQ ID NO: 6134 - DNA, 24 bp, synthetic construct
  misc_feature 1..24: note = Synthetic construct
  source 1..24: mol_type = other DNA
tttgatccagaagatggtgaaaca

SEQ ID NO: 6135 - DNA, 24 bp, synthetic construct
  misc_feature 1..24: note = Synthetic construct
  source 1..24: mol_type = other DNA
atgaacccaaccagtggtgacaca

SEQ ID NO: 6136 - DNA, 24 bp, synthetic construct
  misc_feature 1..24: note = Synthetic construct
  source 1..24: mol_type = other DNA
atcaaccctactagtgatagcaca

SEQ ID NO: 6137 - DNA, 24 bp, synthetic construct
  misc_feature 1..24: note = Synthetic construct
  source 1..24: mol_type = other DNA
gtcagccctatttctggaagaggt

SEQ ID NO: 6138 - DNA, 24 bp, synthetic construct
  misc_feature 1..24: note = Synthetic construct
  source 1..24: mol_type = other DNA
atcaacgctgccagtggtgacacc

SEQ ID NO: 6139 - DNA, 24 bp, synthetic construct
  misc_feature 1..24: note = Synthetic construct
  source 1..24: mol_type = other DNA
atctatcctggtgactctgatacc

SEQ ID NO: 6140 - DNA, 24 bp, synthetic construct
  misc_feature 1..24: note = Synthetic construct
  source 1..24: mol_type = other DNA
atctatcctaatgattttgatacc

SEQ ID NO: 6141 - DNA, 24 bp, synthetic construct
  misc_feature 1..24: note = Synthetic construct
  source 1..24: mol_type = other DNA
atctatcctggtgactctgacacc

SEQ ID NO: 6142 - DNA, 24 bp, synthetic construct
  misc_feature 1..24: note = Synthetic construct
  source 1..24: mol_type = other DNA
atcaatcctgaagactctgatatt

SEQ ID NO: 6143 - DNA, 24 bp, synthetic construct
  misc_feature 1..24: note = Synthetic construct
  source 1..24: mol_type = other DNA
atctttcctgaggactctgatacc

SEQ ID NO: 6144 - DNA, 24 bp, synthetic construct
  misc_feature 1..24: note = Synthetic construct
  source 1..24: mol_type = other DNA
ataaatcctgctgactcgggtgtc

SEQ ID NO: 6145 - DNA, 24 bp, synthetic construct
  misc_feature 1..24: note = Synthetic construct
  source 1..24: mol_type = other DNA
atctatcctggtgactctgataca

SEQ ID NO: 6146 - DNA, 24 bp, synthetic construct
  misc_feature 1..24: note = Synthetic construct
  source 1..24: mol_type = other DNA
atgtttcctgatgactctgatacc

SEQ ID NO: 6147 - DNA, 24 bp, synthetic construct
  misc_feature 1..24: note = Synthetic construct
  source 1..24: mol_type = other DNA
atctatcctgatgactctgatacc

SEQ ID NO: 6148 - DNA, 24 bp, synthetic construct
  misc_feature 1..24: note = Synthetic construct
  source 1..24: mol_type = other DNA
atttatcctggtgactctcatgtc

SEQ ID NO: 6149 - DNA, 24 bp, synthetic construct
  misc_feature 1..24: note = Synthetic construct
  source 1..24: mol_type = other DNA
ctctatcctggtgactcagatatt

SEQ ID NO: 6150 - DNA, 24 bp, synthetic construct
  misc_feature 1..24: note = Synthetic construct
  source 1..24: mol_type = other DNA
atcaatcctggtgactctgaaact

SEQ ID NO: 6151 - DNA, 24 bp, synthetic construct
  misc_feature 1..24: note = Synthetic construct
  source 1..24: mol_type = other DNA
atctatcctgatgacgctgataca

SEQ ID NO: 6152 - DNA, 24 bp, synthetic construct
  misc_feature 1..24: note = Synthetic construct
  source 1..24: mol_type = other DNA
atctatcctggtgattctgatacc

SEQ ID NO: 6153 - DNA, 24 bp, synthetic construct
  misc_feature 1..24: note = Synthetic construct
  source 1..24: mol_type = other DNA
atctatcctggtgactctgatagt

SEQ ID NO: 6154 - DNA, 24 bp, synthetic construct
  misc_feature 1..24: note = Synthetic construct
  source 1..24: mol_type = other DNA
atctaccctggtgactctgatacc

SEQ ID NO: 6155 - DNA, 24 bp, synthetic construct
  misc_feature 1..24: note = Synthetic construct
  source 1..24: mol_type = other DNA
atctttcctggtgactctgatagc

SEQ ID NO: 6156 - DNA, 24 bp, synthetic construct
  misc_feature 1..24: note = Synthetic construct
  source 1..24: mol_type = other DNA
atcaacacctaccaaggcaataca

SEQ ID NO: 6157 - DNA, 24 bp, synthetic construct
  misc_feature 1..24: note = Synthetic construct
  source 1..24: mol_type = other DNA
atcatccctgtgtttgggacacca

SEQ ID NO: 6158 - DNA, 24 bp, synthetic construct
  misc_feature 1..24: note = Synthetic construct
  source 1..24: mol_type = other DNA
atcagtaatagtggtgatactata

SEQ ID NO: 6159 - DNA, 24 bp, synthetic construct
  misc_feature 1..24: note = Synthetic construct
  source 1..24: mol_type = other DNA
gttaatgttggtggtggaatcaca

SEQ ID NO: 6160 - DNA, 24 bp, synthetic construct
  misc_feature 1..24: note = Synthetic construct
  source 1..24: mol_type = other DNA
attagtggtagtggtagtaccaaa

SEQ ID NO: 6161 - DNA, 30 bp, synthetic construct
  misc_feature 1..30: note = Synthetic construct
  source 1..30: mol_type = other DNA
gtgaaaagcaaaactgatggtgggacaaca

SEQ ID NO: 6162 - DNA, 24 bp, synthetic construct
  misc_feature 1..24: note = Synthetic construct
  source 1..24: mol_type = other DNA
attaataacattggtgacaacata

SEQ ID NO: 6163 - DNA, 24 bp, synthetic construct
  misc_feature 1..24: note = Synthetic construct
  source 1..24: mol_type = other DNA
attagtagtagtagtaatttcata

SEQ ID NO: 6164 - DNA, 21 bp, synthetic construct
  misc_feature 1..21: note = Synthetic construct
  source 1..21: mol_type = other DNA
attactagtggtggttacaca

SEQ ID NO: 6165 - DNA, 24 bp, synthetic construct
  misc_feature 1..24: note = Synthetic construct
  source 1..24: mol_type = other DNA
attagtagaagtggtagtaccata

SEQ ID NO: 6166 - DNA, 24 bp, synthetic construct
  misc_feature 1..24: note = Synthetic construct
  source 1..24: mol_type = other DNA
attagtagtgatgctgataacaca

SEQ ID NO: 6167 - DNA, 21 bp, synthetic construct
  misc_feature 1..21: note = Synthetic construct
  source 1..21: mol_type = other DNA
attagtggtggtggaattact

SEQ ID NO: 6168 - DNA, 24 bp, synthetic construct
  misc_feature 1..24: note = Synthetic construct
  source 1..24: mol_type = other DNA
atgattggtactggtggtaccaca

SEQ ID NO: 6169 - DNA, 24 bp, synthetic construct
  misc_feature 1..24: note = Synthetic construct
  source 1..24: mol_type = other DNA
attagtagcagtggtagtattgta

SEQ ID NO: 6170 - DNA, 24 bp, synthetic construct
  misc_feature 1..24: note = Synthetic construct
  source 1..24: mol_type = other DNA
atcagtactagtggttcttactta

SEQ ID NO: 6171 - DNA, 24 bp, synthetic construct
  misc_feature 1..24: note = Synthetic construct
  source 1..24: mol_type = other DNA
attagtagtagtggtagtcacatt

SEQ ID NO: 6172 - DNA, 24 bp, synthetic construct
  misc_feature 1..24: note = Synthetic construct
  source 1..24: mol_type = other DNA
attagtagtaccagtcgttacata

SEQ ID NO: 6173 - DNA, 24 bp, synthetic construct
  misc_feature 1..24: note = Synthetic construct
  source 1..24: mol_type = other DNA
attagtagtggtagtaattacata

SEQ ID NO: 6174 - DNA, 24 bp, synthetic construct
  misc_feature 1..24: note = Synthetic construct
  source 1..24: mol_type = other DNA
attagtggtagtagtaatgacata

SEQ ID NO: 6175 - DNA, 24 bp, synthetic construct
  misc_feature 1..24: note = Synthetic construct
  source 1..24: mol_type = other DNA
attaggagtagtagtacttacata

SEQ ID NO: 6176 - DNA, 24 bp, synthetic construct
  misc_feature 1..24: note = Synthetic construct
  source 1..24: mol_type = other DNA
ataagtggtagtagtagttacaga

SEQ ID NO: 6177 - DNA, 24 bp, synthetic construct
  misc_feature 1..24: note = Synthetic construct
  source 1..24: mol_type = other DNA
attagtagtagtagtagttacata

SEQ ID NO: 6178 - DNA, 24 bp, synthetic construct
  misc_feature 1..24: note = Synthetic construct
  source 1..24: mol_type = other DNA
attagtactagtagtagttacaca

SEQ ID NO: 6179 - DNA, 24 bp, synthetic construct
  misc_feature 1..24: note = Synthetic construct
  source 1..24: mol_type = other DNA
attagcattattggtagtaccata

SEQ ID NO: 6180 - DNA, 24 bp, synthetic construct
  misc_feature 1..24: note = Synthetic construct
  source 1..24: mol_type = other DNA
attagtagtagtggtagtaccatg

SEQ ID NO: 6181 - DNA, 24 bp, synthetic construct
  misc_feature 1..24: note = Synthetic construct
  source 1..24: mol_type = other DNA
attgatagtggtggtactaccata

SEQ ID NO: 6182 - DNA, 24 bp, synthetic construct
  misc_feature 1..24: note = Synthetic construct
  source 1..24: mol_type = other DNA
attagtagtagtggtggaaccata

SEQ ID NO: 6183 - DNA, 24 bp, synthetic construct
  misc_feature 1..24: note = Synthetic construct
  source 1..24: mol_type = other DNA
attagtagtactggtagtaccata

SEQ ID NO: 6184 - DNA, 24 bp, synthetic construct
  misc_feature 1..24: note = Synthetic construct
  source 1..24: mol_type = other DNA
attagtagtggtggttataccata

SEQ ID NO: 6185 - DNA, 24 bp, synthetic construct
  misc_feature 1..24: note = Synthetic construct
  source 1..24: mol_type = other DNA
attagtagtagtgctaatgacatt

SEQ ID NO: 6186 - DNA, 24 bp, synthetic construct
  misc_feature 1..24: note = Synthetic construct
  source 1..24: mol_type = other DNA
attagtagtagtggtagtaccata

SEQ ID NO: 6187 - DNA, 24 bp, synthetic construct
  misc_feature 1..24: note = Synthetic construct
  source 1..24: mol_type = other DNA
attagtagtagtggaagtaccata

SEQ ID NO: 6188 - DNA, 24 bp, synthetic construct
  misc_feature 1..24: note = Synthetic construct
  source 1..24: mol_type = other DNA
atcagcagtattagcaattacatt

SEQ ID NO: 6189 - DNA, 24 bp, synthetic construct
  misc_feature 1..24: note = Synthetic construct
  source 1..24: mol_type = other DNA
atcagtagtggggggagtaccaca

SEQ ID NO: 6190 - DNA, 24 bp, synthetic construct
  misc_feature 1..24: note = Synthetic construct
  source 1..24: mol_type = other DNA
attagtagtagtggtagtaccatt

SEQ ID NO: 6191 - DNA, 24 bp, synthetic construct
  misc_feature 1..24: note = Synthetic construct
  source 1..24: mol_type = other DNA
attagtagtactagttttcccatc

SEQ ID NO: 6192 - DNA, 24 bp, synthetic construct
  misc_feature 1..24: note = Synthetic construct
  source 1..24: mol_type = other DNA
attggaagtagtagtagtgtcata

SEQ ID NO: 6193 - DNA, 24 bp, synthetic construct
  misc_feature 1..24: note = Synthetic construct
  source 1..24: mol_type = other DNA
attagtgatagtgggaggaccata

SEQ ID NO: 6194 - DNA, 24 bp, synthetic construct
  misc_feature 1..24: note = Synthetic construct
  source 1..24: mol_type = other DNA
attagtagcagtgatagttacata

SEQ ID NO: 6195 - DNA, 24 bp, synthetic construct
  misc_feature 1..24: note = Synthetic construct
  source 1..24: mol_type = other DNA
attagttttcgtagtcatttcata

SEQ ID NO: 6196 - DNA, 24 bp, synthetic construct
  misc_feature 1..24: note = Synthetic construct
  source 1..24: mol_type = other DNA
attaatagttatagcagtcacata

SEQ ID NO: 6197 - DNA, 24 bp, synthetic construct
  misc_feature 1..24: note = Synthetic construct
  source 1..24: mol_type = other DNA
atcatccctatctttggaacagca

SEQ ID NO: 6198 - DNA, 24 bp, synthetic construct
  misc_feature 1..24: note = Synthetic construct
  source 1..24: mol_type = other DNA
attagtggcagtggggataccatc

SEQ ID NO: 6199 - DNA, 24 bp, synthetic construct
  misc_feature 1..24: note = Synthetic construct
  source 1..24: mol_type = other DNA
attagtcctactggtagtaccgga

SEQ ID NO: 6200 - DNA, 24 bp, synthetic construct
  misc_feature 1..24: note = Synthetic construct
  source 1..24: mol_type = other DNA
attactagtgatgggaattacata

SEQ ID NO: 6201 - DNA, 24 bp, synthetic construct
  misc_feature 1..24: note = Synthetic construct
  source 1..24: mol_type = other DNA
atcagtggcagtggaacgacgata

SEQ ID NO: 6202 - DNA, 24 bp, synthetic construct
  misc_feature 1..24: note = Synthetic construct
  source 1..24: mol_type = other DNA
attagtcgtactgggactatcata

SEQ ID NO: 6203 - DNA, 24 bp, synthetic construct
  misc_feature 1..24: note = Synthetic construct
  source 1..24: mol_type = other DNA
attggttctagtggaagtaccata

SEQ ID NO: 6204 - DNA, 24 bp, synthetic construct
  misc_feature 1..24: note = Synthetic construct
  source 1..24: mol_type = other DNA
attagtggtaatggtgacaccatc

SEQ ID NO: 6205 - DNA, 30 bp, synthetic construct
  misc_feature 1..30: note = Synthetic construct
  source 1..30: mol_type = other DNA
attaaaagcgaaactgatggtgggacaaca

SEQ ID NO: 6206 - DNA, 24 bp, synthetic construct
  misc_feature 1..24: note = Synthetic construct
  source 1..24: mol_type = other DNA
atcagtagttctgggagtatgata

SEQ ID NO: 6207 - DNA, 24 bp, synthetic construct
  misc_feature 1..24: note = Synthetic construct
  source 1..24: mol_type = other DNA
ataactcgccgtgggacttacatc

SEQ ID NO: 6208 - DNA, 24 bp, synthetic construct
  misc_feature 1..24: note = Synthetic construct
  source 1..24: mol_type = other DNA
atcaacaccaacactgggaaccca

SEQ ID NO: 6209 - DNA, 24 bp, synthetic construct
  misc_feature 1..24: note = Synthetic construct
  source 1..24: mol_type = other DNA
atcaacaccaaaactgggaacccg

SEQ ID NO: 6210 - DNA, 24 bp, synthetic construct
  misc_feature 1..24: note = Synthetic construct
  source 1..24: mol_type = other DNA
atcaacaccaacactgggaggcca

SEQ ID NO: 6211 - DNA, 24 bp, synthetic construct
  misc_feature 1..24: note = Synthetic construct
  source 1..24: mol_type = other DNA
atcaacaccaaaactgggaacgca

SEQ ID NO: 6212 - DNA, 24 bp, synthetic construct
  misc_feature 1..24: note = Synthetic construct
  source 1..24: mol_type = other DNA
ataaattttagtggtggtgtcacc

SEQ ID NO: 6213 - DNA, 24 bp, synthetic construct
  misc_feature 1..24: note = Synthetic construct
  source 1..24: mol_type = other DNA
atcgattggaatggagagaattcg

SEQ ID NO: 6214 - DNA, 24 bp, synthetic construct
  misc_feature 1..24: note = Synthetic construct
  source 1..24: mol_type = other DNA
ataactgatagtggtgcgagcaca

SEQ ID NO: 6215 - DNA, 24 bp, synthetic construct
  misc_feature 1..24: note = Synthetic construct
  source 1..24: mol_type = other DNA
attagtggtagtggtggtaataca

SEQ ID NO: 6216 - DNA, 30 bp, synthetic construct
  misc_feature 1..30: note = Synthetic construct
  source 1..30: mol_type = other DNA
attagaagcaaagctaccggtgggacagca

SEQ ID NO: 6217 - DNA, 24 bp, synthetic construct
  misc_feature 1..24: note = Synthetic construct
  source 1..24: mol_type = other DNA
attagtgaaagtggtggtagcaca

SEQ ID NO: 6218 - DNA, 24 bp, synthetic construct
  misc_feature 1..24: note = Synthetic construct
  source 1..24: mol_type = other DNA
attagtggtagtggttctagcaca

SEQ ID NO: 6219 - DNA, 24 bp, synthetic construct
  misc_feature 1..24: note = Synthetic construct
  source 1..24: mol_type = other DNA
ataaaccaggatggaactgagaca

SEQ ID NO: 6220 - DNA, 24 bp, synthetic construct
  misc_feature 1..24: note = Synthetic construct
  source 1..24: mol_type = other DNA
attattaatagtggtgggagcaca

SEQ ID NO: 6221 - DNA, 24 bp, synthetic construct
  misc_feature 1..24: note = Synthetic construct
  source 1..24: mol_type = other DNA
attagtcgcagtggtgatgcaaca

SEQ ID NO: 6222 - DNA, 24 bp, synthetic construct
  misc_feature 1..24: note = Synthetic construct
  source 1..24: mol_type = other DNA
attagcgggagcgctggtaggaca

SEQ ID NO: 6223 - DNA, 24 bp, synthetic construct
  misc_feature 1..24: note = Synthetic construct
  source 1..24: mol_type = other DNA
ataaagcaagatggaagtgagaaa

SEQ ID NO: 6224 - DNA, 24 bp, synthetic construct
  misc_feature 1..24: note = Synthetic construct
  source 1..24: mol_type = other DNA
ataaagtcagatggaagtgagaaa

SEQ ID NO: 6225 - DNA, 24 bp, synthetic construct
  misc_feature 1..24: note = Synthetic construct
  source 1..24: mol_type = other DNA
attgctagtagtggtagaaccata

SEQ ID NO: 6226 - DNA, 30 bp, synthetic construct
  misc_feature 1..30: note = Synthetic construct
  source 1..30: mol_type = other DNA
attaaaggcaaagattttggcgggaaaaca

SEQ ID NO: 6227 - DNA, 24 bp, synthetic construct
  misc_feature 1..24: note = Synthetic construct
  source 1..24: mol_type = other DNA
attagtgggagtggttccaggata

SEQ ID NO: 6228 - DNA, 24 bp, synthetic construct
  misc_feature 1..24: note = Synthetic construct
  source 1..24: mol_type = other DNA
ataaacctagacggaagtttccaa

SEQ ID NO: 6229 - DNA, 30 bp, synthetic construct
  misc_feature 1..30: note = Synthetic construct
  source 1..30: mol_type = other DNA
attaaaagcagagcttatagtgggacgaca

SEQ ID NO: 6230 - DNA, 24 bp, synthetic construct
  misc_feature 1..24: note = Synthetic construct
  source 1..24: mol_type = other DNA
ataaaacaggattcaggcgcgaga

SEQ ID NO: 6231 - DNA, 24 bp, synthetic construct
  misc_feature 1..24: note = Synthetic construct
  source 1..24: mol_type = other DNA
attgatagtggtgttaggccccta

SEQ ID NO: 6232 - DNA, 24 bp, synthetic construct
  misc_feature 1..24: note = Synthetic construct
  source 1..24: mol_type = other DNA
attagtcaaagtggcagcaggaaa

SEQ ID NO: 6233 - DNA, 24 bp, synthetic construct
  misc_feature 1..24: note = Synthetic construct
  source 1..24: mol_type = other DNA
gttgacgaaactgccactggcaca

SEQ ID NO: 6234 - DNA, 24 bp, synthetic construct
  misc_feature 1..24: note = Synthetic construct
  source 1..24: mol_type = other DNA
attagtgctagtggtggaaacaca

SEQ ID NO: 6235 - DNA, 24 bp, synthetic construct
  misc_feature 1..24: note = Synthetic construct
  source 1..24: mol_type = other DNA
attagtagtagtggtaataccata

SEQ ID NO: 6236 - DNA, 24 bp, synthetic construct
  misc_feature 1..24: note = Synthetic construct
  source 1..24: mol_type = other DNA
attagtagcagtggtagtaccaag

SEQ ID NO: 6237 - DNA, 24 bp, synthetic construct
  misc_feature 1..24: note = Synthetic construct
  source 1..24: mol_type = other DNA
attagtagtagtggcaacaccaaa

SEQ ID NO: 6238 - DNA, 24 bp, synthetic construct
  misc_feature 1..24: note = Synthetic construct
  source 1..24: mol_type = other DNA
attagtagtagtggaagtaccaca

SEQ ID NO: 6239 - DNA, 24 bp, synthetic construct
  misc_feature 1..24: note = Synthetic construct
  source 1..24: mol_type = other DNA
attaattggtatggagaaaggaca

SEQ ID NO: 6240 - DNA, 24 bp, synthetic construct
  misc_feature 1..24: note = Synthetic construct
  source 1..24: mol_type = other DNA
attactggaagtggtgataacatg

SEQ ID NO: 6241 - DNA, 24 bp, synthetic construct
  misc_feature 1..24: note = Synthetic construct
  source 1..24: mol_type = other DNA
cttaccggtggtggtgctatcaca

SEQ ID NO: 6242 - DNA, 24 bp, synthetic construct
  misc_feature 1..24: note = Synthetic construct
  source 1..24: mol_type = other DNA
attagtggtaatggtggtagcaca

SEQ ID NO: 6243 - DNA, 21 bp, synthetic construct
  misc_feature 1..21: note = Synthetic construct
  source 1..21: mol_type = other DNA
ctttatggcgttagaagcaca

SEQ ID NO: 6244 - DNA, 30 bp, synthetic construct
  misc_feature 1..30: note = Synthetic construct
  source 1..30: mol_type = other DNA
attaaaagcaaccttcttggtgcgacagca

SEQ ID NO: 6245 - DNA, 30 bp, synthetic construct
  misc_feature 1..30: note = Synthetic construct
  source 1..30: mol_type = other DNA
attagaagtaaagcttatggtgagacaaca

SEQ ID NO: 6246 - DNA, 30 bp, synthetic construct
  misc_feature 1..30: note = Synthetic construct
  source 1..30: mol_type = other DNA
attagaagcaaagcttatggtgggacaaca

SEQ ID NO: 6247 - DNA, 21 bp, synthetic construct
  misc_feature 1..21: note = Synthetic construct
  source 1..21: mol_type = other DNA
atgtatcctggtggtttcgca

SEQ ID NO: 6248 - DNA, 21 bp, synthetic construct
  misc_feature 1..21: note = Synthetic construct
  source 1..21: mol_type = other DNA
atttatagtggtggtagtaca

SEQ ID NO: 6249 - DNA, 24 bp, synthetic construct
  misc_feature 1..24: note = Synthetic construct
  source 1..24: mol_type = other DNA
attggtggtagtggtgcttacaaa

SEQ ID NO: 6250 - DNA, 24 bp, synthetic construct
  misc_feature 1..24: note = Synthetic construct
  source 1..24: mol_type = other DNA
actagtggtagtggtggaagaaca

SEQ ID NO: 6251 - DNA, 24 bp, synthetic construct
  misc_feature 1..24: note = Synthetic construct
  source 1..24: mol_type = other DNA
attagtggaagtggtgatagtaca

SEQ ID NO: 6252 - DNA, 24 bp, synthetic construct
  misc_feature 1..24: note = Synthetic construct
  source 1..24: mol_type = other DNA
attggtggtagtggtggtcccaca

SEQ ID NO: 6253 - DNA, 24 bp, synthetic construct
  misc_feature 1..24: note = Synthetic construct
  source 1..24: mol_type = other DNA
attagtggtagtggtggtagcaca

SEQ ID NO: 6254 - DNA, 24 bp, synthetic construct
  misc_feature 1..24: note = Synthetic construct
  source 1..24: mol_type = other DNA
attagtgctagtggtactataaca

SEQ ID NO: 6255 - DNA, 24 bp, synthetic construct
  misc_feature 1..24: note = Synthetic construct
  source 1..24: mol_type = other DNA
attagtggtggtggtcgtcacaca

SEQ ID NO: 6256 - DNA, 24 bp, synthetic construct
  misc_feature 1..24: note = Synthetic construct
  source 1..24: mol_type = other DNA
atcagtggcagtggtggtaccaca

SEQ ID NO: 6257 - DNA, 24 bp, synthetic construct
  misc_feature 1..24: note = Synthetic construct
  source 1..24: mol_type = other DNA
attggtgggagtggtggttctaca

SEQ ID NO: 6258 - DNA, 21 bp, synthetic construct
  misc_feature 1..21: note = Synthetic construct
  source 1..21: mol_type = other DNA
atttatagcggtggtagcaca

SEQ ID NO: 6259 - DNA, 24 bp, synthetic construct
  misc_feature 1..24: note = Synthetic construct
  source 1..24: mol_type = other DNA
attagtactggtagtactaagatt

SEQ ID NO: 6260 - DNA, 24 bp, synthetic construct
  misc_feature 1..24: note = Synthetic construct
  source 1..24: mol_type = other DNA
ataaagcaagacggaagtgagaaa

SEQ ID NO: 6261 - DNA, 24 bp, synthetic construct
  misc_feature 1..24: note = Synthetic construct
  source 1..24: mol_type = other DNA
ataaagcaagatggcagtgagaaa

SEQ ID NO: 6262 - DNA, 24 bp, synthetic construct
  misc_feature 1..24: note = Synthetic construct
  source 1..24: mol_type = other DNA
ataaagaaagatggaagtgagaaa

SEQ ID NO: 6263 - DNA, 24 bp, synthetic construct
  misc_feature 1..24: note = Synthetic construct
  source 1..24: mol_type = other DNA
ataagcgacgacggatttcaaaaa

SEQ ID NO: 6264 - DNA, 30 bp, synthetic construct
  misc_feature 1..30: note = Synthetic construct
  source 1..30: mol_type = other DNA
attaaaagcaaaactgatggtgggacaaca

SEQ ID NO: 6265 - DNA, 30 bp, synthetic construct
  misc_feature 1..30: note = Synthetic construct
  source 1..30: mol_type = other DNA
attacaaccaattctgatggtgggacaaca

SEQ ID NO: 6266 - DNA, 30 bp, synthetic construct
  misc_feature 1..30: note = Synthetic construct
  source 1..30: mol_type = other DNA
attaaaagcaaaactgatgatgggacaaca

SEQ ID NO: 6267 - DNA, 30 bp, synthetic construct
  misc_feature 1..30: note = Synthetic construct
  source 1..30: mol_type = other DNA
attagaagcaaagcttttggtgggaccaca

SEQ ID NO: 6268 - DNA, 24 bp, synthetic construct
  misc_feature 1..24: note = Synthetic construct
  source 1..24: mol_type = other DNA
attagtggtagtggtgatagcaca

SEQ ID NO: 6269 - DNA, 24 bp, synthetic construct
  misc_feature 1..24: note = Synthetic construct
  source 1..24: mol_type = other DNA
ataaagcaagatgggagtgacaaa

SEQ ID NO: 6270 - DNA, 24 bp, synthetic construct
  misc_feature 1..24: note = Synthetic construct
  source 1..24: mol_type = other DNA
ataaaccaagatggaagtgagcga

SEQ ID NO: 6271 - DNA, 21 bp, synthetic construct
  misc_feature 1..21: note = Synthetic construct
  source 1..21: mol_type = other DNA
atctatatcggtgatagagca

SEQ ID NO: 6272 - DNA, 24 bp, synthetic construct
  misc_feature 1..24: note = Synthetic construct
  source 1..24: mol_type = other DNA
atcaagttcgatggaagtgaaaaa

SEQ ID NO: 6273 - DNA, 24 bp, synthetic construct
  misc_feature 1..24: note = Synthetic construct
  source 1..24: mol_type = other DNA
gttagtagtggtggcagtacaaaa

SEQ ID NO: 6274 - DNA, 24 bp, synthetic construct
  misc_feature 1..24: note = Synthetic construct
  source 1..24: mol_type = other DNA
attaatggcgatggcacaagtgca

SEQ ID NO: 6275 - DNA, 24 bp, synthetic construct
  misc_feature 1..24: note = Synthetic construct
  source 1..24: mol_type = other DNA
ataaaatatgatggcagtgagaaa

SEQ ID NO: 6276 - DNA, 24 bp, synthetic construct
  misc_feature 1..24: note = Synthetic construct
  source 1..24: mol_type = other DNA
atcactactcaaggctctaccata

SEQ ID NO: 6277 - DNA, 21 bp, synthetic construct
  misc_feature 1..21: note = Synthetic construct
  source 1..21: mol_type = other DNA
attagtggtagtggtgcccca

SEQ ID NO: 6278 - DNA, 24 bp, synthetic construct
  misc_feature 1..24: note = Synthetic construct
  source 1..24: mol_type = other DNA
gttagtgctagtggtggtaacaca

SEQ ID NO: 6279 - DNA, 30 bp, synthetic construct
  misc_feature 1..30: note = Synthetic construct
  source 1..30: mol_type = other DNA
attaaaagcaacactgatggtgagacaaca

SEQ ID NO: 6280 - DNA, 24 bp, synthetic construct
  misc_feature 1..24: note = Synthetic construct
  source 1..24: mol_type = other DNA
ataagatttgatgcgactgacacg

SEQ ID NO: 6281 - DNA, 24 bp, synthetic construct
  misc_feature 1..24: note = Synthetic construct
  source 1..24: mol_type = other DNA
ataaaaaaagatggaagtgagaaa

SEQ ID NO: 6282 - DNA, 30 bp, synthetic construct
  misc_feature 1..30: note = Synthetic construct
  source 1..30: mol_type = other DNA
attaagacgaaggaagatggtgggacaaca

SEQ ID NO: 6283 - DNA, 24 bp, synthetic construct
  misc_feature 1..24: note = Synthetic construct
  source 1..24: mol_type = other DNA
attagcgccagcggcggtaccaca

SEQ ID NO: 6284 - DNA, 24 bp, synthetic construct
  misc_feature 1..24: note = Synthetic construct
  source 1..24: mol_type = other DNA
accatccccatttctggcacagca

SEQ ID NO: 6285 - DNA, 24 bp, synthetic construct
  misc_feature 1..24: note = Synthetic construct
  source 1..24: mol_type = other DNA
attagtagcagtggtagtggcata

SEQ ID NO: 6286 - DNA, 24 bp, synthetic construct
  misc_feature 1..24: note = Synthetic construct
  source 1..24: mol_type = other DNA
atcagtagtggtggtggtaggaca

SEQ ID NO: 6287 - DNA, 24 bp, synthetic construct
  misc_feature 1..24: note = Synthetic construct
  source 1..24: mol_type = other DNA
gtttctactaggggtgataccaca

SEQ ID NO: 6288 - DNA, 24 bp, synthetic construct
  misc_feature 1..24: note = Synthetic construct
  source 1..24: mol_type = other DNA
gtggatcctgaagatggcaaaact

SEQ ID NO: 6289 - DNA, 24 bp, synthetic construct
  misc_feature 1..24: note = Synthetic construct
  source 1..24: mol_type = other DNA
atttcacacgatggaaatagtaaa

SEQ ID NO: 6290 - DNA, 24 bp, synthetic construct
  misc_feature 1..24: note = Synthetic construct
  source 1..24: mol_type = other DNA
attaatagtgatggaaataataca

SEQ ID NO: 6291 - DNA, 24 bp, synthetic construct
  misc_feature 1..24: note = Synthetic construct
  source 1..24: mol_type = other DNA
attagtagtggtgatgtcttcatc

SEQ ID NO: 6292 - DNA, 24 bp, synthetic construct
  misc_feature 1..24: note = Synthetic construct
  source 1..24: mol_type = other DNA
attactaattctggggctggcaca

SEQ ID NO: 6293 - DNA, 24 bp, synthetic construct
  misc_feature 1..24: note = Synthetic construct
  source 1..24: mol_type = other DNA
gtctcatatgatggagacaataaa

SEQ ID NO: 6294 - DNA, 24 bp, synthetic construct
  misc_feature 1..24: note = Synthetic construct
  source 1..24: mol_type = other DNA
atctcttatgatggaattaataaa

SEQ ID NO: 6295 - DNA, 24 bp, synthetic construct
  misc_feature 1..24: note = Synthetic construct
  source 1..24: mol_type = other DNA
gtgtcatttgatggaaacaaaaaa

SEQ ID NO: 6296 - DNA, 24 bp, synthetic construct
  misc_feature 1..24: note = Synthetic construct
  source 1..24: mol_type = other DNA
atatcatataatggaagcagacaa

SEQ ID NO: 6297 - DNA, 24 bp, synthetic construct
  misc_feature 1..24: note = Synthetic construct
  source 1..24: mol_type = other DNA
atatcaaatgatggaaccaaaaca

SEQ ID NO: 6298 - DNA, 24 bp, synthetic construct
  misc_feature 1..24: note = Synthetic construct
  source 1..24: mol_type = other DNA
atatcaaatgacagaaataagaac

SEQ ID NO: 6299 - DNA, 24 bp, synthetic construct
  misc_feature 1..24: note = Synthetic construct
  source 1..24: mol_type = other DNA
atatcatatgatggaacctataaa

SEQ ID NO: 6300 - DNA, 24 bp, synthetic construct
  misc_feature 1..24: note = Synthetic construct
  source 1..24: mol_type = other DNA
ctttggtatgatggaagtaataaa

SEQ ID NO: 6301 - DNA, 24 bp, synthetic construct
  misc_feature 1..24: note = Synthetic construct
  source 1..24: mol_type = other DNA
atatcatttgatggaaacactgag

SEQ ID NO: 6302 - DNA, 24 bp, synthetic construct
  misc_feature 1..24: note = Synthetic construct
  source 1..24: mol_type = other DNA
atctcatatgatgcaagtactgaa

SEQ ID NO: 6303 - DNA, 24 bp, synthetic construct
  misc_feature 1..24: note = Synthetic construct
  source 1..24: mol_type = other DNA
atatcatatgatggaagtaataaa

SEQ ID NO: 6304 - DNA, 24 bp, synthetic construct
  misc_feature 1..24: note = Synthetic construct
  source 1..24: mol_type = other DNA
atatcaaatgatgacagcatcaaa

SEQ ID NO: 6305 - DNA, 24 bp, synthetic construct
  misc_feature 1..24: note = Synthetic construct
  source 1..24: mol_type = other DNA
atatcctatgatgggggcaataaa

SEQ ID NO: 6306 - DNA, 24 bp, synthetic construct
  misc_feature 1..24: note = Synthetic construct
  source 1..24: mol_type = other DNA
atttcaaatgatggaagtaatgaa

SEQ ID NO: 6307 - DNA, 24 bp, synthetic construct
  misc_feature 1..24: note = Synthetic construct
  source 1..24: mol_type = other DNA
atatggtatgatggcactaagaaa

SEQ ID NO: 6308 - DNA, 24 bp, synthetic construct
  misc_feature 1..24: note = Synthetic construct
  source 1..24: mol_type = other DNA
atatcatatgatggaagcaataaa

SEQ ID NO: 6309 - DNA, 24 bp, synthetic construct
  misc_feature 1..24: note = Synthetic construct
  source 1..24: mol_type = other DNA
acatcagatgatggaagcagtaaa

SEQ ID NO: 6310 - DNA, 24 bp, synthetic construct
  misc_feature 1..24: note = Synthetic construct
  source 1..24: mol_type = other DNA
atatggtatgatggaagtaatgaa

SEQ ID NO: 6311 - DNA, 24 bp, synthetic construct
  misc_feature 1..24: note = Synthetic construct
  source 1..24: mol_type = other DNA
atatggtatgatggaagtaataaa

SEQ ID NO: 6312 - DNA, 24 bp, synthetic construct
  misc_feature 1..24: note = Synthetic construct
  source 1..24: mol_type = other DNA
atatggaatgacggacagaagtca

SEQ ID NO: 6313 - DNA, 24 bp, synthetic construct
  misc_feature 1..24: note = Synthetic construct
  source 1..24: mol_type = other DNA
atatcaaatgatggaagcaataaa

SEQ ID NO: 6314 - DNA, 24 bp, synthetic construct
  misc_feature 1..24: note = Synthetic construct
  source 1..24: mol_type = other DNA
atatggtatgatggaagtaatcaa

SEQ ID NO: 6315 - DNA, 24 bp, synthetic construct
  misc_feature 1..24: note = Synthetic construct
  source 1..24: mol_type = other DNA
atatcacatgatggaaacaagaaa

SEQ ID NO: 6316 - DNA, 24 bp, synthetic construct
  misc_feature 1..24: note = Synthetic construct
  source 1..24: mol_type = other DNA
gtatcacttgatggagacaaagaa

SEQ ID NO: 6317 - DNA, 24 bp, synthetic construct
  misc_feature 1..24: note = Synthetic construct
  source 1..24: mol_type = other DNA
atatcatatgatggaaacaatgaa

SEQ ID NO: 6318 - DNA, 24 bp, synthetic construct
  misc_feature 1..24: note = Synthetic construct
  source 1..24: mol_type = other DNA
atatcagatgatggacaccataaa

SEQ ID NO: 6319 - DNA, 24 bp, synthetic construct
  misc_feature 1..24: note = Synthetic construct
  source 1..24: mol_type = other DNA
atatcatatgatggaagccatgat

SEQ ID NO: 6320 - DNA, 24 bp, synthetic construct
  misc_feature 1..24: note = Synthetic construct
  source 1..24: mol_type = other DNA
gtgtcatatgacgagagacagaaa

SEQ ID NO: 6321 - DNA, 24 bp, synthetic construct
  misc_feature 1..24: note = Synthetic construct
  source 1..24: mol_type = other DNA
atctcatatcatggaagtgataaa

SEQ ID NO: 6322 - DNA, 30 bp, synthetic construct
  misc_feature 1..30: note = Synthetic construct
  source 1..30: mol_type = other DNA
attagaagcaaagctaacagttacgcgaca

SEQ ID NO: 6323 - DNA, 24 bp, synthetic construct
  misc_feature 1..24: note = Synthetic construct
  source 1..24: mol_type = other DNA
attagttggaatagtgttaccata

SEQ ID NO: 6324 - DNA, 24 bp, synthetic construct
  misc_feature 1..24: note = Synthetic construct
  source 1..24: mol_type = other DNA
attacttggaatagtggtagcaca

SEQ ID NO: 6325 - DNA, 24 bp, synthetic construct
  misc_feature 1..24: note = Synthetic construct
  source 1..24: mol_type = other DNA
attagttggaatagtggtagcgta

SEQ ID NO: 6326 - DNA, 24 bp, synthetic construct
  misc_feature 1..24: note = Synthetic construct
  source 1..24: mol_type = other DNA
attagttggaatagtagaagcata

SEQ ID NO: 6327 - DNA, 24 bp, synthetic construct
  misc_feature 1..24: note = Synthetic construct
  source 1..24: mol_type = other DNA
attagttggaatagtggtagcata

SEQ ID NO: 6328 - DNA, 24 bp, synthetic construct
  misc_feature 1..24: note = Synthetic construct
  source 1..24: mol_type = other DNA
attaattgggatggtagtatcacg

SEQ ID NO: 6329 - DNA, 24 bp, synthetic construct
  misc_feature 1..24: note = Synthetic construct
  source 1..24: mol_type = other DNA
attaattgggatggtagtagtaca

SEQ ID NO: 6330 - DNA, 24 bp, synthetic construct
  misc_feature 1..24: note = Synthetic construct
  source 1..24: mol_type = other DNA
attacttgggatggtggtcacaca

SEQ ID NO: 6331 - DNA, 24 bp, synthetic construct
  misc_feature 1..24: note = Synthetic construct
  source 1..24: mol_type = other DNA
gttgatcctgaagatggtgaaaca

SEQ ID NO: 6332 - DNA, 24 bp, synthetic construct
  misc_feature 1..24: note = Synthetic construct
  source 1..24: mol_type = other DNA
gttgatccagaagatggtgaaaca

SEQ ID NO: 6333 - DNA, 24 bp, synthetic construct
  misc_feature 1..24: note = Synthetic construct
  source 1..24: mol_type = other DNA
gttgatcctgaaaataatgaagcg

SEQ ID NO: 6334 - DNA, 24 bp, synthetic construct
  misc_feature 1..24: note = Synthetic construct
  source 1..24: mol_type = other DNA
atcaaccctagtggtggtagcaca

SEQ ID NO: 6335 - DNA, 24 bp, synthetic construct
  misc_feature 1..24: note = Synthetic construct
  source 1..24: mol_type = other DNA
atcagaccttctggtggtagcaca

SEQ ID NO: 6336 - DNA, 24 bp, synthetic construct
  misc_feature 1..24: note = Synthetic construct
  source 1..24: mol_type = other DNA
atcaaccctagtggtggtacccca

SEQ ID NO: 6337 - DNA, 24 bp, synthetic construct
  misc_feature 1..24: note = Synthetic construct
  source 1..24: mol_type = other DNA
atcaaccctaatagtggtagctca

SEQ ID NO: 6338 - DNA, 24 bp, synthetic construct
  misc_feature 1..24: note = Synthetic construct
  source 1..24: mol_type = other DNA
atcaaccctaacagtggtggcaca

SEQ ID NO: 6339 - DNA, 24 bp, synthetic construct
  misc_feature 1..24: note = Synthetic construct
  source 1..24: mol_type = other DNA
atcaaccctaacagtggtggcacc

SEQ ID NO: 6340 - DNA, 24 bp, synthetic construct
  misc_feature 1..24: note = Synthetic construct
  source 1..24: mol_type = other DNA
atcaaccctagtggtggtaacaca

SEQ ID NO: 6341 - DNA, 24 bp, synthetic construct
  misc_feature 1..24: note = Synthetic construct
  source 1..24: mol_type = other DNA
atcaatcccaatgatggaaacaca

SEQ ID NO: 6342 - DNA, 24 bp, synthetic construct
  misc_feature 1..24: note = Synthetic construct
  source 1..24: mol_type = other DNA
tttgatcctgaagatggtgaaaca

SEQ ID NO: 6343 - DNA, 24 bp, synthetic construct
  misc_feature 1..24: note = Synthetic construct
  source 1..24: mol_type = other DNA
atcaacggtgacaatggtaacaca

SEQ ID NO: 6344 - DNA, 24 bp, synthetic construct
  misc_feature 1..24: note = Synthetic construct
  source 1..24: mol_type = other DNA
atcgtcgttggcagtggtaacaca

SEQ ID NO: 6345 - DNA, 24 bp, synthetic construct
  misc_feature 1..24: note = Synthetic construct
  source 1..24: mol_type = other DNA
atatcatatgatgggaggcaagaa

SEQ ID NO: 6346 - DNA, 24 bp, synthetic construct
  misc_feature 1..24: note = Synthetic construct
  source 1..24: mol_type = other DNA
atcaacgctggcaatgataacaca

SEQ ID NO: 6347 - DNA, 24 bp, synthetic construct
  misc_feature 1..24: note = Synthetic construct
  source 1..24: mol_type = other DNA
atcaacactggcaagggctataca

SEQ ID NO: 6348 - DNA, 24 bp, synthetic construct
  misc_feature 1..24: note = Synthetic construct
  source 1..24: mol_type = other DNA
attaatcctgaaaatgatgaaacc

SEQ ID NO: 6349 - DNA, 24 bp, synthetic construct
  misc_feature 1..24: note = Synthetic construct
  source 1..24: mol_type = other DNA
attagttatagtagtaattacata

SEQ ID NO: 6350 - DNA, 30 bp, synthetic construct
  misc_feature 1..30: note = Synthetic construct
  source 1..30: mol_type = other DNA
gctggagacaaaattcacaattatatcata

SEQ ID NO: 6351 - DNA, 30 bp, synthetic construct
  misc_feature 1..30: note = Synthetic construct
  source 1..30: mol_type = other DNA
attagagataagtctcacggcgcgacaacg

SEQ ID NO: 6352 - DNA, 21 bp, synthetic construct
  misc_feature 1..21: note = Synthetic construct
  source 1..21: mol_type = other DNA
atttatatcggtggaagcaca

SEQ ID NO: 6353 - DNA, 24 bp, synthetic construct
  misc_feature 1..24: note = Synthetic construct
  source 1..24: mol_type = other DNA
attagtcacagtagtagttatgta

SEQ ID NO: 6354 - DNA, 24 bp, synthetic construct
  misc_feature 1..24: note = Synthetic construct
  source 1..24: mol_type = other DNA
gtcagtagtagtggacaaaccact

SEQ ID NO: 6355 - DNA, 24 bp, synthetic construct
  misc_feature 1..24: note = Synthetic construct
  source 1..24: mol_type = other DNA
attagtagtagtggtgatgacatg

SEQ ID NO: 6356 - DNA, 24 bp, synthetic construct
  misc_feature 1..24: note = Synthetic construct
  source 1..24: mol_type = other DNA
ataaaacaagatggaagtgagaag

SEQ ID NO: 6357 - DNA, 24 bp, synthetic construct
  misc_feature 1..24: note = Synthetic construct
  source 1..24: mol_type = other DNA
attagtcgtggtggtccctggaca

SEQ ID NO: 6358 - DNA, 24 bp, synthetic construct
  misc_feature 1..24: note = Synthetic construct
  source 1..24: mol_type = other DNA
attagtagtagtgatactaccata

SEQ ID NO: 6359 - DNA, 24 bp, synthetic construct
  misc_feature 1..24: note = Synthetic construct
  source 1..24: mol_type = other DNA
attgttactagtagtttttacata

SEQ ID NO: 6360 - DNA, 24 bp, synthetic construct
  misc_feature 1..24: note = Synthetic construct
  source 1..24: mol_type = other DNA
attaacagtgatgggactagcaca

SEQ ID NO: 6361 - DNA, 24 bp, synthetic construct
  misc_feature 1..24: note = Synthetic construct
  source 1..24: mol_type = other DNA
ttcagtggcagtggtgatcgttta

SEQ ID NO: 6362 - DNA, 21 bp, synthetic construct
  misc_feature 1..21: note = Synthetic construct
  source 1..21: mol_type = other DNA
atttatgccggtggaagtaca

SEQ ID NO: 6363 - DNA, 24 bp, synthetic construct
  misc_feature 1..24: note = Synthetic construct
  source 1..24: mol_type = other DNA
ctttcctttggcagcgaattctcc

SEQ ID NO: 6364 - DNA, 24 bp, synthetic construct
  misc_feature 1..24: note = Synthetic construct
  source 1..24: mol_type = other DNA
gttagtgttgctggtagtggcaca

SEQ ID NO: 6365 - DNA, 24 bp, synthetic construct
  misc_feature 1..24: note = Synthetic construct
  source 1..24: mol_type = other DNA
gtcgtccctatctttggtacaaca

SEQ ID NO: 6366 - DNA, 24 bp, synthetic construct
  misc_feature 1..24: note = Synthetic construct
  source 1..24: mol_type = other DNA
atgaaccctgccagtggcaacaca

SEQ ID NO: 6367 - DNA, 24 bp, synthetic construct
  misc_feature 1..24: note = Synthetic construct
  source 1..24: mol_type = other DNA
acaatccctatcttcgacatacca

SEQ ID NO: 6368 - DNA, 24 bp, synthetic construct
  misc_feature 1..24: note = Synthetic construct
  source 1..24: mol_type = other DNA
atcgtcgttgccggaatgaagaca

SEQ ID NO: 6369 - DNA, 24 bp, synthetic construct
  misc_feature 1..24: note = Synthetic construct
  source 1..24: mol_type = other DNA
gtagatcctgagaatggtgaaaca

SEQ ID NO: 6370 - DNA, 24 bp, synthetic construct
  misc_feature 1..24: note = Synthetic construct
  source 1..24: mol_type = other DNA
atcaaccctgaaagtggtgtcgca

SEQ ID NO: 6371 - DNA, 24 bp, synthetic construct
  misc_feature 1..24: note = Synthetic construct
  source 1..24: mol_type = other DNA
atcaaccctaacagtggcggcaga

SEQ ID NO: 6372 - DNA, 24 bp, synthetic construct
  misc_feature 1..24: note = Synthetic construct
  source 1..24: mol_type = other DNA
gttgttcctgaagatggtgaaaca

SEQ ID NO: 6373 - DNA, 24 bp, synthetic construct
  misc_feature 1..24: note = Synthetic construct
  source 1..24: mol_type = other DNA
atcaattgtaacagtggtgccaca

SEQ ID NO: 6374 - DNA, 24 bp, synthetic construct
  misc_feature 1..24: note = Synthetic construct
  source 1..24: mol_type = other DNA
atcaaccctagcagtggtggcaca

SEQ ID NO: 6375 - DNA, 24 bp, synthetic construct
  misc_feature 1..24: note = Synthetic construct
  source 1..24: mol_type = other DNA
atcaatgctgacaatggtcgaacg

SEQ ID NO: 6376 - DNA, 24 bp, synthetic construct
  misc_feature 1..24: note = Synthetic construct
  source 1..24: mol_type = other DNA
atcagtggaggtggaggtaccact

SEQ ID NO: 6377 - DNA, 24 bp, synthetic construct
  misc_feature 1..24: note = Synthetic construct
  source 1..24: mol_type = other DNA
atcaaccccagtggtggtggaaca

SEQ ID NO: 6378 - DNA, 24 bp, synthetic construct
  misc_feature 1..24: note = Synthetic construct
  source 1..24: mol_type = other DNA
gtttcgtctgatgcatccaaaaaa

SEQ ID NO: 6379 - DNA, 24 bp, synthetic construct
  misc_feature 1..24: note = Synthetic construct
  source 1..24: mol_type = other DNA
atcctccctgttattgaaaaacca

SEQ ID NO: 6380 - DNA, 24 bp, synthetic construct
  misc_feature 1..24: note = Synthetic construct
  source 1..24: mol_type = other DNA
atcatccctctctttggttcacca

SEQ ID NO: 6381 - DNA, 24 bp, synthetic construct
  misc_feature 1..24: note = Synthetic construct
  source 1..24: mol_type = other DNA
gtcatccctgtacttgggacatca

SEQ ID NO: 6382 - DNA, 24 bp, synthetic construct
  misc_feature 1..24: note = Synthetic construct
  source 1..24: mol_type = other DNA
atcatccccgtgtttggtgcacca

SEQ ID NO: 6383 - DNA, 24 bp, synthetic construct
  misc_feature 1..24: note = Synthetic construct
  source 1..24: mol_type = other DNA
atcagtggtaatagtggttacaag

SEQ ID NO: 6384 - DNA, 24 bp, synthetic construct
  misc_feature 1..24: note = Synthetic construct
  source 1..24: mol_type = other DNA
atcactactagtggtggtaccata

SEQ ID NO: 6385 - DNA, 24 bp, synthetic construct
  misc_feature 1..24: note = Synthetic construct
  source 1..24: mol_type = other DNA
atcaacacctacactgggacccca

SEQ ID NO: 6386 - DNA, 24 bp, synthetic construct
  misc_feature 1..24: note = Synthetic construct
  source 1..24: mol_type = other DNA
ataaacaaagatgggactaagacg

SEQ ID NO: 6387 - DNA, 24 bp, synthetic construct
  misc_feature 1..24: note = Synthetic construct
  source 1..24: mol_type = other DNA
attagtaacagtggtcataaaaca

SEQ ID NO: 6388 - DNA, 24 bp, synthetic construct
  misc_feature 1..24: note = Synthetic construct
  source 1..24: mol_type = other DNA
ataaagcaggatggaagtgaaatc

SEQ ID NO: 6389 - DNA, 30 bp, synthetic construct
  misc_feature 1..30: note = Synthetic construct
  source 1..30: mol_type = other DNA
gtgaaaagtagagttaatagtgggacaaca

SEQ ID NO: 6390 - DNA, 30 bp, synthetic construct; identical to SEQ ID NO: 1805
  misc_feature 1..30: note = Synthetic construct
  source 1..30: mol_type = other DNA

SEQ ID NO: 6391 - DNA, 30 bp, synthetic construct
  misc_feature 1..30: note = Synthetic construct
  source 1..30: mol_type = other DNA
attaaaagcaaaattgatggtgggacggcg

SEQ ID NO: 6392 - DNA, 30 bp, synthetic construct
  misc_feature 1..30: note = Synthetic construct
  source 1..30: mol_type = other DNA
atgaaaaggagatcttatggtgtgacaaca

SEQ ID NO: 6393 - DNA, 24 bp, synthetic construct
  misc_feature 1..24: note = Synthetic construct
  source 1..24: mol_type = other DNA
ctcaaccctagtggtgataccaaa

SEQ ID NO: 6394 - DNA, 24 bp, synthetic construct
  misc_feature 1..24: note = Synthetic construct
  source 1..24: mol_type = other DNA
atttcatttcacggaaacaatgaa

SEQ ID NO: 6395 - DNA, 21 bp, synthetic construct
  misc_feature 1..21: note = Synthetic construct
  source 1..21: mol_type = other DNA
actttctggaatgatgatagg

SEQ ID NO: 6396 - DNA, 24 bp, synthetic construct
  misc_feature 1..24: note = Synthetic construct
  source 1..24: mol_type = other DNA
atcaccgtctatagtggtaacata

SEQ ID NO: 6397 - DNA, 24 bp, synthetic construct
  misc_feature 1..24: note = Synthetic construct
  source 1..24: mol_type = other DNA
acatcttttgatgggagatttaaa

SEQ ID NO: 6398 - DNA, 24 bp, synthetic construct
  misc_feature 1..24: note = Synthetic construct
  source 1..24: mol_type = other DNA
atcaacgctggcaacggttacaca

SEQ ID NO: 6399 - DNA, 24 bp, synthetic construct
  misc_feature 1..24: note = Synthetic construct
  source 1..24: mol_type = other DNA
atgaaccctgaccgaggcaacacg

SEQ ID NO: 6400 - DNA, 24 bp, synthetic construct
  misc_feature 1..24: note = Synthetic construct
  source 1..24: mol_type = other DNA
atcatccctggctttggtgtggtg

SEQ ID NO: 6401 - DNA, 24 bp, synthetic construct
  misc_feature 1..24: note = Synthetic construct
  source 1..24: mol_type = other DNA
gccgtccctgtccttgggacttca

SEQ ID NO: 6402 - DNA, 24 bp, synthetic construct
  misc_feature 1..24: note = Synthetic construct
  source 1..24: mol_type = other DNA
agcattcctatcttgggaacagcg

SEQ ID NO: 6403 - DNA, 21 bp, synthetic construct
  misc_feature 1..21: note = Synthetic construct
  source 1..21: mol_type = other DNA
attttttcgaatggcgaaaaa

SEQ ID NO: 6404 - DNA, 21 bp, synthetic construct
  misc_feature 1..21: note = Synthetic construct
  source 1..21: mol_type = other DNA
attgattgggatgatgataaa

SEQ ID NO: 6405 - DNA, 24 bp, synthetic construct
  misc_feature 1..24: note = Synthetic construct
  source 1..24: mol_type = other DNA
ctcatccctctcttacggatcccc

SEQ ID NO: 6406 - DNA, 24 bp, synthetic construct
  misc_feature 1..24: note = Synthetic construct
  source 1..24: mol_type = other DNA
atcaacccttacaatggtgacaca

SEQ ID NO: 6407 - DNA, 24 bp, synthetic construct
  misc_feature 1..24: note = Synthetic construct
  source 1..24: mol_type = other DNA
atctatcctcgtgactccgatacc

SEQ ID NO: 6408 - DNA, 21 bp, synthetic construct
  misc_feature 1..21: note = Synthetic construct
  source 1..21: mol_type = other DNA
atcactcgaagtggaaacacc

SEQ ID NO: 6409 - DNA, 21 bp, synthetic construct
  misc_feature 1..21: note = Synthetic construct
  source 1..21: mol_type = other DNA
atttatgacgatggcagaaca

SEQ ID NO: 6410 - DNA, 30 bp, synthetic construct
  misc_feature 1..30: note = Synthetic construct
  source 1..30: mol_type = other DNA
attaaaagcaaagcttatggtgggacaaca

SEQ ID NO: 6411 - DNA, 21 bp, synthetic construct
  misc_feature 1..21: note = Synthetic construct
  source 1..21: mol_type = other DNA
attttttcgaatgacgaaaaa

SEQ ID NO: 6412 - DNA, 21 bp, synthetic construct
  misc_feature 1..21: note = Synthetic construct
  source 1..21: mol_type = other DNA
atagattgggatgatgataaa

SEQ ID NO: 6413 - DNA, 21 bp, synthetic construct
  misc_feature 1..21: note = Synthetic construct
  source 1..21: mol_type = other DNA
attttttcgaatgacgccaag

SEQ ID NO: 6414 - DNA, 30 bp, synthetic construct
  misc_feature 1..30: note = Synthetic construct
  source 1..30: mol_type = other DNA
attagaaacttcaattacggtggaacaccg

SEQ ID NO: 6415 - DNA, 21 bp, synthetic construct
  misc_feature 1..21: note = Synthetic construct
  source 1..21: mol_type = other DNA
attgattgggatgatagtaaa

SEQ ID NO: 6416 - DNA, 24 bp, synthetic construct
  misc_feature 1..24: note = Synthetic construct
  source 1..24: mol_type = other DNA
attagtgccacaggtggcggcgcc

SEQ ID NO: 6417 - DNA, 21 bp, synthetic construct
  misc_feature 1..21: note = Synthetic construct
  source 1..21: mol_type = other DNA
attgattgggataatgataga

SEQ ID NO: 6418 - DNA, 21 bp, synthetic construct
  misc_feature 1..21: note = Synthetic construct
  source 1..21: mol_type = other DNA
atttattggaatgatgatgag

SEQ ID NO: 6419 - DNA, 21 bp, synthetic construct
  misc_feature 1..21: note = Synthetic construct
  source 1..21: mol_type = other DNA
atttattggaatgacaataat

SEQ ID NO: 6420 - DNA, 21 bp, synthetic construct
  misc_feature 1..21: note = Synthetic construct
  source 1..21: mol_type = other DNA
atttattggaatgatgataag

SEQ ID NO: 6421 - DNA, 21 bp, synthetic construct
  misc_feature 1..21: note = Synthetic construct
  source 1..21: mol_type = other DNA
atttactggaatgatgataag

SEQ ID NO: 6422 - DNA, 21 bp, synthetic construct
  misc_feature 1..21: note = Synthetic construct
  source 1..21: mol_type = other DNA
atttatgggaatgacgataag

SEQ ID NO: 6423 - DNA, 21 bp, synthetic construct
  misc_feature 1..21: note = Synthetic construct
  source 1..21: mol_type = other DNA
atttatttgactgatgataaa

SEQ ID NO: 6424 - DNA, 21 bp, synthetic construct
  misc_feature 1..21: note = Synthetic construct
  source 1..21: mol_type = other DNA
attaattggaatgatgataag

SEQ ID NO: 6425 - DNA, 24 bp, synthetic construct
  misc_feature 1..24: note = Synthetic construct
  source 1..24: mol_type = other DNA
atcagtgggggtggtcggagtatt

SEQ ID NO: 6426 - DNA, 24 bp, synthetic construct
  misc_feature 1..24: note = Synthetic construct
  source 1..24: mol_type = other DNA
attagtagcagtggtaacactgtg

SEQ ID NO: 6427 - DNA, 21 bp, synthetic construct
  misc_feature 1..21: note = Synthetic construct
  source 1..21: mol_type = other DNA
gtcttttacagtgggaccacc

SEQ ID NO: 6428 - DNA, 27 bp, synthetic construct
  misc_feature 1..27: note = Synthetic construct
  source 1..27: mol_type = other DNA
acatactacaggtccaagtggtatatt

SEQ ID NO: 6429 - DNA, 21 bp, synthetic construct
  misc_feature 1..21: note = Synthetic construct
  source 1..21: mol_type = other DNA
atctattacactgggagcacc

SEQ ID NO: 6430 - DNA, 21 bp, synthetic construct
  misc_feature 1..21: note = Synthetic construct
  source 1..21: mol_type = other DNA
atctcttacagcgggagtacc

SEQ ID NO: 6431 - DNA, 21 bp, synthetic construct
  misc_feature 1..21: note = Synthetic construct
  source 1..21: mol_type = other DNA
atcaatgatggcggaagcacg

SEQ ID NO: 6432 - DNA, 21 bp, synthetic construct
  misc_feature 1..21: note = Synthetic construct
  source 1..21: mol_type = other DNA
atctttcacagtgggaccacc

SEQ ID NO: 6433 - DNA, 21 bp, synthetic construct
  misc_feature 1..21: note = Synthetic construct
  source 1..21: mol_type = other DNA
atctattatagtgggaccacc

SEQ ID NO: 6434 - DNA, 21 bp, synthetic construct
  misc_feature 1..21: note = Synthetic construct
  source 1..21: mol_type = other DNA
atccaaagtggtggaaccacc

SEQ ID NO: 6435 - DNA, 21 bp, synthetic construct
  misc_feature 1..21: note = Synthetic construct
  source 1..21: mol_type = other DNA
atctataccaatgggggcacc

SEQ ID NO: 6436 - DNA, 21 bp, synthetic construct
  misc_feature 1..21: note = Synthetic construct
  source 1..21: mol_type = other DNA
atctatagaagtggatacact

SEQ ID NO: 6437 - DNA, 21 bp, synthetic construct
  misc_feature 1..21: note = Synthetic construct
  source 1..21: mol_type = other DNA
atctataccagtgggatcacc

SEQ ID NO: 6438 - DNA, 21 bp, synthetic construct
  misc_feature 1..21: note = Synthetic construct
  source 1..21: mol_type = other DNA
atccgctacagtggcgccacc

SEQ ID NO: 6439 - DNA, 21 bp, synthetic construct
  misc_feature 1..21: note = Synthetic construct
  source 1..21: mol_type = other DNA
gtctattacaatgagagcatc

SEQ ID NO: 6440 - DNA, 21 bp, synthetic construct
  misc_feature 1..21: note = Synthetic construct
  source 1..21: mol_type = other DNA
atccattatagtggcaacttc

SEQ ID NO: 6441 - DNA, 21 bp, synthetic construct
  misc_feature 1..21: note = Synthetic construct
  source 1..21: mol_type = other DNA
atcttttacagtgggaccacc

SEQ ID NO: 6442 - DNA, 21 bp, synthetic construct
  misc_feature 1..21: note = Synthetic construct
  source 1..21: mol_type = other DNA
atcaatcatagaggaagcacc

SEQ ID NO: 6443 - DNA, 21 bp, synthetic construct
  misc_feature 1..21: note = Synthetic construct
  source 1..21: mol_type = other DNA
atctattacagtgggagcacc

SEQ ID NO: 6444 - DNA, 21 bp, synthetic construct
  misc_feature 1..21: note = Synthetic construct
  source 1..21: mol_type = other DNA
atctattcgaatgggacctcc

SEQ ID NO: 6445 - DNA, 21 bp, synthetic construct
  misc_feature 1..21: note = Synthetic construct
  source 1..21: mol_type = other DNA
attcctactactgggagtagt

SEQ ID NO: 6446 - DNA, 21 bp, synthetic construct
  misc_feature 1..21: note = Synthetic construct
  source 1..21: mol_type = other DNA
atctataccagtgggagcacc

SEQ ID NO: 6447 - DNA, 21 bp, synthetic construct
  misc_feature 1..21: note = Synthetic construct
  source 1..21: mol_type = other DNA
atcgctgccagtggcagctcg

SEQ ID NO: 6448 - DNA, 21 bp, synthetic construct
  misc_feature 1..21: note = Synthetic construct
  source 1..21: mol_type = other DNA
atccatatcagtgggaacacc

SEQ ID NO: 6449 - DNA, 21 bp, synthetic construct
  misc_feature 1..21: note = Synthetic construct
  source 1..21: mol_type = other DNA
atccattacagtggcggcacc

SEQ ID NO: 6450 - DNA, 21 bp, synthetic construct
  misc_feature 1..21: note = Synthetic construct
  source 1..21: mol_type = other DNA
atctattacaatgggaacacc

SEQ ID NO: 6451 - DNA, 21 bp, synthetic construct
  misc_feature 1..21: note = Synthetic construct
  source 1..21: mol_type = other DNA
atttttatcagtgggagcacc

SEQ ID NO: 6452 - DNA, 21 bp, synthetic construct
  misc_feature 1..21: note = Synthetic construct
  source 1..21: mol_type = other DNA
ttgtatagtagcggcaatggt

SEQ ID NO: 6453 - DNA, 21 bp, synthetic construct
  misc_feature 1..21: note = Synthetic construct
  source 1..21: mol_type = other DNA
atcaatcataatggagccacc

SEQ ID NO: 6454 - DNA, 21 bp, synthetic construct
  misc_feature 1..21: note = Synthetic construct
  source 1..21: mol_type = other DNA
atcgatcatagtggcagcacc

SEQ ID NO: 6455 - DNA, 21 bp, synthetic construct
  misc_feature 1..21: note = Synthetic construct
  source 1..21: mol_type = other DNA
atcaatcatcgtggaagcacc

SEQ ID NO: 6456 - DNA, 21 bp, synthetic construct
  misc_feature 1..21: note = Synthetic construct
  source 1..21: mol_type = other DNA
atcaatcatagtggaggcacc

SEQ ID NO: 6457 - DNA, 21 bp, synthetic construct
  misc_feature 1..21: note = Synthetic construct
  source 1..21: mol_type = other DNA
atcagtcatggtggaggcacc

SEQ ID NO: 6458 - DNA, 21 bp, synthetic construct
  misc_feature 1..21: note = Synthetic construct
  source 1..21: mol_type = other DNA
atcaatcaaagtggaagcacc

SEQ ID NO: 6459 - DNA, 21 bp, synthetic construct
  misc_feature 1..21: note = Synthetic construct
  source 1..21: mol_type = other DNA
atcaatcatactggaagcacc

SEQ ID NO: 6460 - DNA, 21 bp, synthetic construct
  misc_feature 1..21: note = Synthetic construct
  source 1..21: mol_type = other DNA
atcaatcatagtggaaccacc

SEQ ID NO: 6461 - DNA, 21 bp, synthetic construct
  misc_feature 1..21: note = Synthetic construct
  source 1..21: mol_type = other DNA
atctataacactgggaccacc

SEQ ID NO: 6462 - DNA, 21 bp, synthetic construct
  misc_feature 1..21: note = Synthetic construct
  source 1..21: mol_type = other DNA
atctcttatactgggagcacc

SEQ ID NO: 6463 - DNA, 21 bp, synthetic construct
  misc_feature 1..21: note = Synthetic construct
  source 1..21: mol_type = other DNA
atctatcatagtgggagcacc

SEQ ID NO: 6464 - DNA, 21 bp, synthetic construct
  misc_feature 1..21: note = Synthetic construct
  source 1..21: mol_type = other DNA
atcttttacagtgggagtgcc

SEQ ID NO: 6465 - DNA, 21 bp, synthetic construct
  misc_feature 1..21: note = Synthetic construct
  source 1..21: mol_type = other DNA
gtttattatactgggaccacc

SEQ ID NO: 6466 - DNA, 21 bp, synthetic construct
  misc_feature 1..21: note = Synthetic construct
  source 1..21: mol_type = other DNA
agttataacaatgagagaacg

SEQ ID NO: 6467 - DNA, 21 bp, synthetic construct
  misc_feature 1..21: note = Synthetic construct
  source 1..21: mol_type = other DNA
atctattacagtgggagcgcc

SEQ ID NO: 6468 - DNA, 21 bp, synthetic construct
  misc_feature 1..21: note = Synthetic construct
  source 1..21: mol_type = other DNA
atctattacagtgggagttcc

SEQ ID NO: 6469 - DNA, 21 bp, synthetic construct
  misc_feature 1..21: note = Synthetic construct
  source 1..21: mol_type = other DNA
atctactacagtgggagcacc

SEQ ID NO: 6470 - DNA, 21 bp, synthetic construct
  misc_feature 1..21: note = Synthetic construct
  source 1..21: mol_type = other DNA
atctattacagtgggggcacc

SEQ ID NO: 6471 - DNA, 21 bp, synthetic construct
  misc_feature 1..21: note = Synthetic construct
  source 1..21: mol_type = other DNA
atctataacagtgcgaacacc

SEQ ID NO: 6472 - DNA, 21 bp, synthetic construct
  misc_feature 1..21: note = Synthetic construct
  source 1..21: mol_type = other DNA
atcgaaaccagtgggagcacc

SEQ ID NO: 6473 - DNA, 21 bp, synthetic construct
  misc_feature 1..21: note = Synthetic construct
  source 1..21: mol_type = other DNA
atgtacaccagtgggcgcacc

SEQ ID NO: 6474 - DNA, 21 bp, synthetic construct
  misc_feature 1..21: note = Synthetic construct
  source 1..21: mol_type = other DNA
atctataccagtgagagcacc

SEQ ID NO: 6475 - DNA, 21 bp, synthetic construct
  misc_feature 1..21: note = Synthetic construct
  source 1..21: mol_type = other DNA
atctctaccagtgggagcacc

SEQ ID NO: 6476 - DNA, 21 bp, synthetic construct
  misc_feature 1..21: note = Synthetic construct
  source 1..21: mol_type = other DNA
atctacaccagtgggaccacc

SEQ ID NO: 6477 - DNA, 21 bp, synthetic construct
  misc_feature 1..21: note = Synthetic construct
  source 1..21: mol_type = other DNA
atcaattacagtgggaccacc

SEQ ID NO: 6478 - DNA, 21 bp, synthetic construct
  misc_feature 1..21: note = Synthetic construct
  source 1..21: mol_type = other DNA
gtccatcacactgggagcacc

SEQ ID NO: 6479 - DNA, 21 bp, synthetic construct
  misc_feature 1..21: note = Synthetic construct
  source 1..21: mol_type = other DNA
gtctactatactgggagcacc

SEQ ID NO: 6480 - DNA, 21 bp, synthetic construct
  misc_feature 1..21: note = Synthetic construct
  source 1..21: mol_type = other DNA
atcaatcatactggaaagtcc

SEQ ID NO: 6481 - DNA, 21 bp, synthetic construct
  misc_feature 1..21: note = Synthetic construct
  source 1..21: mol_type = other DNA
atctatgacactgggagcacc

SEQ ID NO: 6482 - DNA, 21 bp, synthetic construct
  misc_feature 1..21: note = Synthetic construct
  source 1..21: mol_type = other DNA
atcactcatcgcggagacatc

SEQ ID NO: 6483 - DNA, 21 bp, synthetic construct
  misc_feature 1..21: note = Synthetic construct
  source 1..21: mol_type = other DNA
atcagtcatagtggaaccaca

SEQ ID NO: 6484 - DNA, 21 bp, synthetic construct
  misc_feature 1..21: note = Synthetic construct
  source 1..21: mol_type = other DNA
gtcaatcatagtggaagcacc

SEQ ID NO: 6485 - DNA, 21 bp, synthetic construct
  misc_feature 1..21: note = Synthetic construct
  source 1..21: mol_type = other DNA
attaatcatagtggaagcact

SEQ ID NO: 6486 - DNA, 21 bp, synthetic construct
  misc_feature 1..21: note = Synthetic construct
  source 1..21: mol_type = other DNA
atcttctatacggggagcacc

SEQ ID NO: 6487 - DNA, 21 bp, synthetic construct
  misc_feature 1..21: note = Synthetic construct
  source 1..21: mol_type = other DNA
ttctataacagcgggagcgcc

SEQ ID NO: 6488 - DNA, 21 bp, synthetic construct
  misc_feature 1..21: note = Synthetic construct
  source 1..21: mol_type = other DNA
gtggatcacagtgggagttcc

SEQ ID NO: 6489 - DNA, 21 bp, synthetic construct
  misc_feature 1..21: note = Synthetic construct
  source 1..21: mol_type = other DNA
atctacttcggcgggagaacc

SEQ ID NO: 6490 - DNA, 21 bp, synthetic construct
  misc_feature 1..21: note = Synthetic construct
  source 1..21: mol_type = other DNA
atctatactactggaatcgcc

SEQ ID NO: 6491 - DNA, 21 bp, synthetic construct
  misc_feature 1..21: note = Synthetic construct
  source 1..21: mol_type = other DNA
gtctatcataatgggaacacc

SEQ ID NO: 6492 - DNA, 21 bp, synthetic construct
  misc_feature 1..21: note = Synthetic construct
  source 1..21: mol_type = other DNA
atccattatactgggcccgcc

SEQ ID NO: 6493 - DNA, 21 bp, synthetic construct
  misc_feature 1..21: note = Synthetic construct
  source 1..21: mol_type = other DNA
atgtatgagagtggaaacaca

SEQ ID NO: 6494 - DNA, 21 bp, synthetic construct
  misc_feature 1..21: note = Synthetic construct
  source 1..21: mol_type = other DNA
atccattatagtgggaacacc

SEQ ID NO: 6495 - DNA, 21 bp, synthetic construct
  misc_feature 1..21: note = Synthetic construct
  source 1..21: mol_type = other DNA
atctattatagtgggagcacc

SEQ ID NO: 6496 - DNA, 21 bp, synthetic construct
  misc_feature 1..21: note = Synthetic construct
  source 1..21: mol_type = other DNA
atctattatagtgggatcacc

SEQ ID NO: 6497 - DNA, 21 bp, synthetic construct
  misc_feature 1..21: note = Synthetic construct
  source 1..21: mol_type = other DNA
atctattatagtgggagcagc

SEQ ID NO: 6498 - DNA, 21 bp, synthetic construct
  misc_feature 1..21: note = Synthetic construct
  source 1..21: mol_type = other DNA
atctattatagtgggagctcc

SEQ ID NO: 6499 - DNA, 21 bp, synthetic construct
  misc_feature 1..21: note = Synthetic construct
  source 1..21: mol_type = other DNA
gtctattacagtgggagcacc

SEQ ID NO: 6500 - DNA, 21 bp, synthetic construct
  misc_feature 1..21: note = Synthetic construct
  source 1..21: mol_type = other DNA
attcaccacagtgggagcacg

SEQ ID NO: 6501 - DNA, 21 bp, synthetic construct
  misc_feature 1..21: note = Synthetic construct
  source 1..21: mol_type = other DNA
gtatttcatagtgggaaaacc

SEQ ID NO: 6502 - DNA, 21 bp, synthetic construct
  misc_feature 1..21: note = Synthetic construct
  source 1..21: mol_type = other DNA
atgtatcatagtggcagtccc

SEQ ID NO: 6503 - DNA, 21 bp, synthetic construct
  misc_feature 1..21: note = Synthetic construct
  source 1..21: mol_type = other DNA
atctaccatagtgggaaaacc

SEQ ID NO: 6504 - DNA, 21 bp, synthetic construct
  misc_feature 1..21: note = Synthetic construct
  source 1..21: mol_type = other DNA
atctatcatagtgggaacacc

SEQ ID NO: 6505 - DNA, 21 bp, synthetic construct
  misc_feature 1..21: note = Synthetic construct
  source 1..21: mol_type = other DNA
atctatcacagagggaacacc

SEQ ID NO: 6506 - DNA, 21 bp, synthetic construct
  misc_feature 1..21: note = Synthetic construct
  source 1..21: mol_type = other DNA
atgtttcatagtgggaacacc

SEQ ID NO: 6507 - DNA, 21 bp, synthetic construct
  misc_feature 1..21: note = Synthetic construct
  source 1..21: mol_type = other DNA
atctatcatagtgagagcacc

SEQ ID NO: 6508 - DNA, 21 bp, synthetic construct
  misc_feature 1..21: note = Synthetic construct
  source 1..21: mol_type = other DNA
atgtatcccagcgggaacacc

SEQ ID NO: 6509 - DNA, 21 bp, synthetic construct
  misc_feature 1..21: note = Synthetic construct
  source 1..21: mol_type = other DNA
atctttcatagtggaaacacc

SEQ ID NO: 6510 - DNA, 21 bp, synthetic construct
  misc_feature 1..21: note = Synthetic construct
  source 1..21: mol_type = other DNA
atcaatcatggtgggatcacc

SEQ ID NO: 6511 - DNA, 21 bp, synthetic construct
  misc_feature 1..21: note = Synthetic construct
  source 1..21: mol_type = other DNA
gtttatcatagtgggaccacc

SEQ ID NO: 6512 - DNA, 21 bp, synthetic construct
  misc_feature 1..21: note = Synthetic construct
  source 1..21: mol_type = other DNA
atctattatagtggggaaact

SEQ ID NO: 6513 - DNA, 21 bp, synthetic construct
  misc_feature 1..21: note = Synthetic construct
  source 1..21: mol_type = other DNA
atctatcatagtgggaccttc

SEQ ID NO: 6514 - DNA, 21 bp, synthetic construct
  misc_feature 1..21: note = Synthetic construct
  source 1..21: mol_type = other DNA
atctaccacagtgggggcacc

SEQ ID NO: 6515 - DNA, 21 bp, synthetic construct
  misc_feature 1..21: note = Synthetic construct
  source 1..21: mol_type = other DNA
gtctttcatactgggacgacc

SEQ ID NO: 6516 - DNA, 24 bp, synthetic construct
  misc_feature 1..24: note = Synthetic construct
  source 1..24: mol_type = other DNA
atcatcccgatccttggcacagca

SEQ ID NO: 6517 - DNA, 24 bp, synthetic construct
  misc_feature 1..24: note = Synthetic construct
  source 1..24: mol_type = other DNA
atcatccctgtctttggtacaact

SEQ ID NO: 6518 - DNA, 24 bp, synthetic construct
  misc_feature 1..24: note = Synthetic construct
  source 1..24: mol_type = other DNA
atcattcctctctttggaacacca

SEQ ID NO: 6519 - DNA, 24 bp, synthetic construct
  misc_feature 1..24: note = Synthetic construct
  source 1..24: mol_type = other DNA
agcatccctgtccttggcacaaca

SEQ ID NO: 6520 - DNA, 24 bp, synthetic construct
  misc_feature 1..24: note = Synthetic construct
  source 1..24: mol_type = other DNA
atcagtgcttccaacggtcacaca

SEQ ID NO: 6521 - DNA, 24 bp, synthetic construct
  misc_feature 1..24: note = Synthetic construct
  source 1..24: mol_type = other DNA
attagatacgatggggggaagcag

SEQ ID NO: 6522 - DNA, 24 bp, synthetic construct
  misc_feature 1..24: note = Synthetic construct
  source 1..24: mol_type = other DNA
attagtagtggtcgtgttttcatt

SEQ ID NO: 6523 - DNA, 24 bp, synthetic construct
  misc_feature 1..24: note = Synthetic construct
  source 1..24: mol_type = other DNA
attgatcctgacgatggtgaagtt

SEQ ID NO: 6524 - DNA, 21 bp, synthetic construct
  misc_feature 1..21: note = Synthetic construct
  source 1..21: mol_type = other DNA
attggtcgcgggtcttccata

SEQ ID NO: 6525 - DNA, 24 bp, synthetic construct
  misc_feature 1..24: note = Synthetic construct
  source 1..24: mol_type = other DNA
atcagtgggggtggcagaaataca

SEQ ID NO: 6526 - DNA, 24 bp, synthetic construct
  misc_feature 1..24: note = Synthetic construct
  source 1..24: mol_type = other DNA
cttaattggaagggtggtaacata

SEQ ID NO: 6527 - DNA, 24 bp, synthetic construct
  misc_feature 1..24: note = Synthetic construct
  source 1..24: mol_type = other DNA
attactagtggtggtcgtaacata

SEQ ID NO: 6528 - DNA, 24 bp, synthetic construct
  misc_feature 1..24: note = Synthetic construct
  source 1..24: mol_type = other DNA
agtccatatgatggaagcagtcaa

SEQ ID NO: 6529 - DNA, 24 bp, synthetic construct
  misc_feature 1..24: note = Synthetic construct
  source 1..24: mol_type = other DNA
atcaaccctgtcagtggtgacgca

SEQ ID NO: 6530 - DNA, 24 bp, synthetic construct
  misc_feature 1..24: note = Synthetic construct
  source 1..24: mol_type = other DNA
cctgaccctgaagatggcgcaaca

SEQ ID NO: 6531 - DNA, 21 bp, synthetic construct
  misc_feature 1..21: note = Synthetic construct
  source 1..21: mol_type = other DNA
atctacgggaatgatgataag

SEQ ID NO: 6532 - DNA, 24 bp, synthetic construct
  misc_feature 1..24: note = Synthetic construct
  source 1..24: mol_type = other DNA
ttcttccctctccttggaacacca

SEQ ID NO: 6533 - DNA, 24 bp, synthetic construct
  misc_feature 1..24: note = Synthetic construct
  source 1..24: mol_type = other DNA
atttcatatgatggaggtcttaaa

SEQ ID NO: 6534 - DNA, 60 bp, synthetic construct
  misc_feature 1..60: note = Synthetic construct
  source 1..60: mol_type = other DNA
gcgagacatcgggattacgacattttgactggttattatatgggggactactttgactac

SEQ ID NO: 6535 - DNA, 48 bp, synthetic construct
  misc_feature 1..48: note = Synthetic construct
  source 1..48: mol_type = other DNA
gcgagacttaacttggggttcctacagattgggggttcccttgatatc

SEQ ID NO: 6536 - DNA, 51 bp, synthetic construct
  misc_feature 1..51: note = Synthetic construct
  source 1..51: mol_type = other DNA
gcgagagctcggggttattattatgatagtagtggttatcaaattgactac

SEQ ID NO: 6537 - DNA, 57 bp, synthetic construct
  misc_feature 1..57: note = Synthetic construct
  source 1..57: mol_type = other DNA
gcgagagttattactagggcgagtcctggcacagacgggaggtacggtatggacgtc

SEQ ID NO: 6538 - DNA, 81 bp, synthetic construct
  misc_feature 1..81: note = Synthetic construct
  source 1..81: mol_type = other DNA
gcgcggggccacagtagctcgtctcaacggtctagcttcgacggtaactttttatactactactatcaccaaatggacgtc

SEQ ID NO: 6539 - DNA, 63 bp, synthetic construct
  misc_feature 1..63: note = Synthetic construct
  source 1..63: mol_type = other DNA
gtgacttctttaattcggccatattgtagtggcggtgtctgctattcgaactggttcgacccc

SEQ ID NO: 6540 - DNA, 48 bp, synthetic construct
  misc_feature 1..48: note = Synthetic construct
  source 1..48: mol_type = other DNA
gcgagaggtcggggattgcagcaccagctgacagactggttcgacccc

SEQ ID NO: 6541 - DNA, 48 bp, synthetic construct
  misc_feature 1..48: note = Synthetic construct
  source 1..48: mol_type = other DNA
gcgagagtcccccccccgggagtggctaataataagtggttcgacctc

SEQ ID NO: 6542 - DNA, 60 bp, synthetic construct
  misc_feature 1..60: note = Synthetic construct
  source 1..60: mol_type = other DNA
gcgagaggggaaggtccggggacttatatagtctcggggcgatggggctactttgagttc

SEQ ID NO: 6543 - DNA, 33 bp, synthetic construct
  misc_feature 1..33: note = Synthetic construct
  source 1..33: mol_type = other DNA
ggtagaccaggaatggcagaagttggtacttat

SEQ ID NO: 6544 - DNA, 51 bp, synthetic construct
  misc_feature 1..51: note = Synthetic construct
  source 1..51: mol_type = other DNA
gcgaaagatcgcagtagtggctggtaccggggttttggggggattgactac

SEQ ID NO: 6545 - DNA, 33 bp, synthetic construct
  misc_feature 1..33: note = Synthetic construct
  source 1..33: mol_type = other DNA
tcgagaaggagggctgggcccgattttgattac

SEQ ID NO: 6546 - DNA, 39 bp, synthetic construct
  misc_feature 1..39: note = Synthetic construct
  source 1..39: mol_type = other DNA
actacccgacatcaatattgtactactaccaggtgcccc

SEQ ID NO: 6547 - DNA, 30 bp, synthetic construct
  misc_feature 1..30: note = Synthetic construct
  source 1..30: mol_type = other DNA
acggccgcgcgagttgcctggttcgacccc

SEQ ID NO: 6548 - DNA, 39 bp, synthetic construct
  misc_feature 1..39: note = Synthetic construct
  source 1..39: mol_type = other DNA
acgacaatattcggagaagtgttatatccttttgactcc

SEQ ID NO: 6549 - DNA, 48 bp, synthetic construct
  misc_feature 1..48: note = Synthetic construct
  source 1..48: mol_type = other DNA
gcaacagtgtataccaatgcctggtacggaggcgcgggttttgactac

SEQ ID NO: 6550 - DNA, 63 bp, synthetic construct
  misc_feature 1..63: note = Synthetic construct
  source 1..63: mol_type = other DNA
gcgagagcggcaattaaacgggatgggtatggttcggggagttatccagatgctttagacatc

SEQ ID NO: 6551 - DNA, 48 bp, synthetic construct
  misc_feature 1..48: note = Synthetic construct
  source 1..48: mol_type = other DNA
gcgaaacctccgggtaagggagcagtggctggcacctactttgactac

SEQ ID NO: 6552 - DNA, 39 bp, synthetic construct
  misc_feature 1..39: note = Synthetic construct
  source 1..39: mol_type = other DNA
gcgagagatagttgtagtggtggaagttgctatgactac

SEQ ID NO: 6553 - DNA, 39 bp, synthetic construct
  misc_feature 1..39: note = Synthetic construct
  source 1..39: mol_type = other DNA
gcgagacagggtctcggtggtcgggcctcgggagactcc

SEQ ID NO: 6554 - DNA, 51 bp, synthetic construct
  misc_feature 1..51: note = Synthetic construct
  source 1..51: mol_type = other DNA
gcgagatctccacctgcttatgccaactcaataaacaactggttcgacccc

SEQ ID NO: 6555 - DNA, 39 bp, synthetic construct
  misc_feature 1..39: note = Synthetic construct
  source 1..39: mol_type = other DNA
gcgagagataatagtactgggtggtattggtttgatccc

SEQ ID NO: 6556 - DNA, 42 bp, synthetic construct
  misc_feature 1..42: note = Synthetic construct
  source 1..42: mol_type = other DNA
gcgaggggggaccggagcgtttaccccaactggttcgacctc

SEQ ID NO: 6557 - DNA, 42 bp, synthetic construct
  misc_feature 1..42: note = Synthetic construct
  source 1..42: mol_type = other DNA
gcgagagccctctacggtggtcggggacactggttcgacccc

SEQ ID NO: 6558 - DNA, 30 bp, synthetic construct
  misc_feature 1..30: note = Synthetic construct
  source 1..30: mol_type = other DNA
gcgagactggactttcggggagtcctccgc

SEQ ID NO: 6559 - DNA, 54 bp, synthetic construct
  misc_feature 1..54: note = Synthetic construct
  source 1..54: mol_type = other DNA
gcgagagacttaacggaagtggtgggagcttctgtttccgatgcttttgatatc

SEQ ID NO: 6560 - DNA, 60 bp, synthetic construct
  misc_feature 1..60: note = Synthetic construct
  source 1..60: mol_type = other DNA
gcgagaggatccttggcttatgatactagtggttattactaccgcaacttcttcgacccc

SEQ ID NO: 6561 - DNA, 69 bp, synthetic construct
  misc_feature 1..69: note = Synthetic construct
  source 1..69: mol_type = other DNA
gcgagagttcgctacgatttttggagtggttatgagggccggggggaggaccactatcacatggacgtc

SEQ ID NO: 6562 - DNA, 39 bp, synthetic construct
  misc_feature 1..39: note = Synthetic construct
  source 1..39: mol_type = other DNA
gtgacagatagcgcagggagcccctatgcctttgatatt

SEQ ID NO: 6563 - DNA, 45 bp, synthetic construct
  misc_feature 1..45: note = Synthetic construct
  source 1..45: mol_type = other DNA
gcaacaaaaggaggattttccaattctcggggagttatgaacttc

SEQ ID NO: 6564 - DNA, 33 bp, synthetic construct
  misc_feature 1..33: note = Synthetic construct
  source 1..33: mol_type = other DNA
gcgagagggggccgatgggatgcttttgatatc

SEQ ID NO: 6565 - DNA, 48 bp, synthetic construct
  misc_feature 1..48: note = Synthetic construct
  source 1..48: mol_type = other DNA
gcgagagacctcccctatacatattgtggtgatgactgctattccctc

SEQ ID NO: 6566 - DNA, 51 bp, synthetic construct
  misc_feature 1..51: note = Synthetic construct
  source 1..51: mol_type = other DNA
gcgaggggcaagcagctcgtccggttccactactactactacatggacgtc

SEQ ID NO: 6567 - DNA, 69 bp, synthetic construct
  misc_feature 1..69: note = Synthetic construct
  source 1..69: mol_type = other DNA
gcgagaggcaaagggcttgattacgatattttgactggttgggggtggtactactactacatggacgtc

SEQ ID NO: 6568 - DNA, 63 bp, synthetic construct
  misc_feature 1..63: note = Synthetic construct
  source 1..63: mol_type = other DNA
gcgagaggctctagtggttcggggagttattatagctactactactactactacatggacgtc

SEQ ID NO: 6569 - DNA, 39 bp, synthetic construct
  misc_feature 1..39: note = Synthetic construct
  source 1..39: mol_type = other DNA
gcgagatcggattactatgatagtagtggttatggtctc

SEQ ID NO: 6570 - DNA, 36 bp, synthetic construct
  misc_feature 1..36: note = Synthetic construct
  source 1..36: mol_type = other DNA
gcgcgagggactatgatcgcgaaaaactttgactcc

SEQ ID NO: 6571 - DNA, 51 bp, synthetic construct
  misc_feature 1..51: note = Synthetic construct
  source 1..51: mol_type = other DNA
gcgagagccggtcggaggccgccctttagtaaccaccctaattttgactct

SEQ ID NO: 6572 - DNA, 45 bp, synthetic construct
  misc_feature 1..45: note = Synthetic construct
  source 1..45: mol_type = other DNA
gtcgctcggagtcccccagcctacttctactactacatgaatgtc

SEQ ID NO: 6573 - DNA, 36 bp, synthetic construct
  misc_feature 1..36: note = Synthetic construct
  source 1..36: mol_type = other DNA
gcgaggacaaattacggtgaccaatattttgactac

SEQ ID NO: 6574 - DNA, 54 bp, synthetic construct
  misc_feature 1..54: note = Synthetic construct
  source 1..54: mol_type = other DNA
gcgagagcgccggggattgtggcggtcagagccacggagggctggtacgacccc

SEQ ID NO: 6575 - DNA, 51 bp, synthetic construct
  misc_feature 1..51: note = Synthetic construct
  source 1..51: mol_type = other DNA
gcgagagaggtcggttgtagtggtattaactgccagggctggttcgacccc

SEQ ID NO: 6576 - DNA, 63 bp, synthetic construct
  misc_feature 1..63: note = Synthetic construct
  source 1..63: mol_type = other DNA
gcgagagagaaaattgggcccaaaacttacgatattttgactggttacactatctttgactac

SEQ ID NO: 6577 - DNA, 42 bp, synthetic construct
  misc_feature 1..42: note = Synthetic construct
  source 1..42: mol_type = other DNA
gcgagaggggggtatgattacctttgggggagtcatgggtac

SEQ ID NO: 6578 - DNA, 48 bp, synthetic construct; identical to SEQ ID NO: 1814
  misc_feature 1..48: note = Synthetic construct
  source 1..48: mol_type = other DNA

SEQ ID NO: 6579 - DNA, 54 bp, synthetic construct
  misc_feature 1..54: note = Synthetic construct
  source 1..54: mol_type = other DNA
gcgagagatctatggtatgattttgatagcagtgctgcggggtcccttgacgac

SEQ ID NO: 6580 - DNA, 30 bp, synthetic construct
  misc_feature 1..30: note = Synthetic construct
  source 1..30: mol_type = other DNA
gcgacagacctaggagcaccttcggggcac

SEQ ID NO: 6581 - DNA, 45 bp, synthetic construct
  misc_feature 1..45: note = Synthetic construct
  source 1..45: mol_type = other DNA
gcgatagatgtgggggctactgggggggcctactactttgactac

SEQ ID NO: 6582 - DNA, 63 bp, synthetic construct
  misc_feature 1..63: note = Synthetic construct
  source 1..63: mol_type = other DNA
gcgagatgtcgtgtaggtcggacaagtatgtctcagcccctaatcggggctgcttttgatatc

SEQ ID NO: 6583 - DNA, 30 bp, synthetic construct
  misc_feature 1..30: note = Synthetic construct
  source 1..30: mol_type = other DNA
gcgagagcaaggtacactgtggatgactac

SEQ ID NO: 6584 - DNA, 69 bp, synthetic construct
  misc_feature 1..69: note = Synthetic construct
  source 1..69: mol_type = other DNA
gcgagagatggaaattacgatttttggagtggttataacccttttgggtactaccactacatggacgtc

SEQ ID NO: 6585 - DNA, 45 bp, synthetic construct
  misc_feature 1..45: note = Synthetic construct
  source 1..45: mol_type = other DNA
gcgagagccccttcggacgcccattactattactatatggacgtc

SEQ ID NO: 6586 - DNA, 60 bp, synthetic construct
  misc_feature 1..60: note = Synthetic construct
  source 1..60: mol_type = other DNA
gcgagggaaaattacattttacgatatttaccggtggcccggcggggcgctgttgatatc

SEQ ID NO: 6587 - DNA, 51 bp, synthetic construct
  misc_feature 1..51: note = Synthetic construct
  source 1..51: mol_type = other DNA
gctatcttaacattttacgatattttgagtggcccctactcgtttgacttc

SEQ ID NO: 6588 - DNA, 48 bp, synthetic construct
  misc_feature 1..48: note = Synthetic construct
  source 1..48: mol_type = other DNA
gcgagagatggggcccggatagtgggactgactcatgcacttgatatt

SEQ ID NO: 6589 - DNA, 54 bp, synthetic construct
  misc_feature 1..54: note = Synthetic construct
  source 1..54: mol_type = other DNA
gctcggggaaagagacccggctactgcagcggaggcgtctgttcctctgaatat

SEQ ID NO: 6590 - DNA, 54 bp, synthetic construct
  misc_feature 1..54: note = Synthetic construct
  source 1..54: mol_type = other DNA
gctcggggaaagagacccggctactgcagcggaggcgtctgttcctctgactat

SEQ ID NO: 6591 - DNA, 51 bp, synthetic construct
  misc_feature 1..51: note = Synthetic construct
  source 1..51: mol_type = other DNA
gcgagacacccggctacatcaatggctggcatgtggggttacattgacacc

SEQ ID NO: 6592 - DNA, 51 bp, synthetic construct
  misc_feature 1..51: note = Synthetic construct
  source 1..51: mol_type = other DNA
gcgagagtggtgggcgtccgacactgggagcagttctactacatggacgtc

SEQ ID NO: 6593 - DNA, 24 bp, synthetic construct
  misc_feature 1..24: note = Synthetic construct
  source 1..24: mol_type = other DNA
gtgagacgcccctggttcgacccc

SEQ ID NO: 6594 - DNA, 69 bp, synthetic construct
  misc_feature 1..69: note = Synthetic construct
  source 1..69: mol_type = other DNA
gcgacagagggcaaaggcgcaagtaaggcatattgtggggatgagtgctccttctcattctttgaccag

SEQ ID NO: 6595 - DNA, 60 bp, synthetic construct
  misc_feature 1..60: note = Synthetic construct
  source 1..60: mol_type = other DNA
gcgagcctagatgaaagacgaggatacagctatggttaccacttctattacatggacgtc

SEQ ID NO: 6596 - DNA, 54 bp, synthetic construct
  misc_feature 1..54: note = Synthetic construct
  source 1..54: mol_type = other DNA
gcgagagacttaggtatagcagtggctggtaagagggacgatgcttttgatatc

SEQ ID NO: 6597 - DNA, 57 bp, synthetic construct
  misc_feature 1..57: note = Synthetic construct
  source 1..57: mol_type = other DNA
gcgagagagcaaggtcccgaatatagtgggagctactactactactacatggacgtc

SEQ ID NO: 6598 - DNA, 51 bp, synthetic construct
  misc_feature 1..51: note = Synthetic construct
  source 1..51: mol_type = other DNA
gcgttcagcgattactctgatagtagcggctattacttcttttttgactac

SEQ ID NO: 6599 - DNA, 72 bp, synthetic construct
  misc_feature 1..72: note = Synthetic construct
  source 1..72: mol_type = other DNA
gcgagaccctcgggtagggattactctcgttatggttcgggggggcgaaacttctactactacatggacgtc

SEQ ID NO: 6600 - DNA, 54 bp, synthetic construct
  misc_feature 1..54: note = Synthetic construct
  source 1..54: mol_type = other DNA
gcgagagacggggagtattgtggtactgcctgctccatcaactggttcgacccc

SEQ ID NO: 6601 - DNA, 45 bp, synthetic construct
  misc_feature 1..45: note = Synthetic construct
  source 1..45: mol_type = other DNA
gcgagagatttccaggcgtcgatggtgagtcctagggtcgcctac

SEQ ID NO: 6602 - DNA, 33 bp, synthetic construct
  misc_feature 1..33: note = Synthetic construct
  source 1..33: mol_type = other DNA
gcgagagccgactacggttcctctctggacgtc

SEQ ID NO: 6603 - DNA, 51 bp, synthetic construct
  misc_feature 1..51: note = Synthetic construct
  source 1..51: mol_type = other DNA
gcgagagattcagtagtaccagctgctatggagggcaactggttcgacccc

SEQ ID NO: 6604 - DNA, 33 bp, synthetic construct
  misc_feature 1..33: note = Synthetic construct
  source 1..33: mol_type = other DNA
gcgagagctgaccttaatggtgcttttgatatc

SEQ ID NO: 6605 - DNA, 39 bp, synthetic construct
  misc_feature 1..39: note = Synthetic construct
  source 1..39: mol_type = other DNA
gcgagaggggaagtgggagctacggtccggtttgactac

SEQ ID NO: 6606 - DNA, 69 bp, synthetic construct
  misc_feature 1..69: note = Synthetic construct
  source 1..69: mol_type = other DNA
gcgagagtcgtaaagggaaaacagtattacgatattttgactggttattatgagaactggttcgacccc

SEQ ID NO: 6607 - DNA, 60 bp, synthetic construct
  misc_feature 1..60: note = Synthetic construct
  source 1..60: mol_type = other DNA
gcgagatctgaacatccctttgactggttattctgttgcgactactactacatggacgtc

SEQ ID NO: 6608 - DNA, 36 bp, synthetic construct
  misc_feature 1..36: note = Synthetic construct
  source 1..36: mol_type = other DNA
gcgagagtatcgcccgcgacaatgcgggcagtctac

SEQ ID NO: 6609 - DNA, 66 bp, synthetic construct
  misc_feature 1..66: note = Synthetic construct
  source 1..66: mol_type = other DNA
gcggaggactcattttgtggtgatgactgctctcgataccagactcggaggggggcttttaatgtc

SEQ ID NO: 6610 - DNA, 39 bp, synthetic construct
  misc_feature 1..39: note = Synthetic construct
  source 1..39: mol_type = other DNA
gcgagaggggattactttgatagtatcggtttacggtac

SEQ ID NO: 6611 - DNA, 36 bp, synthetic construct
  misc_feature 1..36: note = Synthetic construct
  source 1..36: mol_type = other DNA
gcgagggaatcgggaggcttttcgggttttgacttc

SEQ ID NO: 6612 - DNA, 27 bp, synthetic construct
  misc_feature 1..27: note = Synthetic construct
  source 1..27: mol_type = other DNA
gcgagagaagtagggtggttcgacccc

SEQ ID NO: 6613 - DNA, 42 bp, synthetic construct
  misc_feature 1..42: note = Synthetic construct
  source 1..42: mol_type = other DNA
gcgagagaatcctcgttcgggtgggacaatgtcttggacctt

SEQ ID NO: 6614 - DNA, 48 bp, synthetic construct
  misc_feature 1..48: note = Synthetic construct
  source 1..48: mol_type = other DNA
gcaaatttattttgtgggggtggtaggtgctattccctgtttgactac

SEQ ID NO: 6615 - DNA, 54 bp, synthetic construct
  misc_feature 1..54: note = Synthetic construct
  source 1..54: mol_type = other DNA
gcgaagagatctgggtgggagtacggggggcgttcttcgtactacatggacgtc

SEQ ID NO: 6616 - DNA, 42 bp, synthetic construct
  misc_feature 1..42: note = Synthetic construct
  source 1..42: mol_type = other DNA
gcgagagatcaggggatacagattcgtgatgcttttgatctc

SEQ ID NO: 6617 - DNA, 54 bp, synthetic construct
  misc_feature 1..54: note = Synthetic construct
  source 1..54: mol_type = other DNA
gcgagagaggcagttacggttcggggaattggcttctactaccacatggacgtc

SEQ ID NO: 6618 - DNA, 45 bp, synthetic construct
  misc_feature 1..45: note = Synthetic construct
  source 1..45: mol_type = other DNA
gcgagaggcctagtgggacctcctatttcttcgtacctcgatctc

SEQ ID NO: 6619 - DNA, 63 bp, synthetic construct
  misc_feature 1..63: note = Synthetic construct
  source 1..63: mol_type = other DNA
gcgagaacatattgtggtggtgattgctatttgaggggttggatccctgtttcttttgatatc

SEQ ID NO: 6620 - DNA, 42 bp, synthetic construct
  misc_feature 1..42: note = Synthetic construct
  source 1..42: mol_type = other DNA
gcgagagactccaaacgtattagtctgtctcaggaagactac

SEQ ID NO: 6621 - DNA, 48 bp, synthetic construct
  misc_feature 1..48: note = Synthetic construct
  source 1..48: mol_type = other DNA
gcgagagccgccgagtcggctacatctactcactggtacttcgatctc

SEQ ID NO: 6622 - DNA, 36 bp, synthetic construct
  misc_feature 1..36: note = Synthetic construct
  source 1..36: mol_type = other DNA
gcgcgatcaggcggacccgcggcctggctcgacccc

SEQ ID NO: 6623 - DNA, 27 bp, synthetic construct
  misc_feature 1..27: note = Synthetic construct
  source 1..27: mol_type = other DNA
gcgactcttggtgacgaccataattcc

SEQ ID NO: 6624 - DNA, 45 bp, synthetic construct
  misc_feature 1..45: note = Synthetic construct
  source 1..45: mol_type = other DNA
gcgaccgtcagggagcgcctcggagtctccgggtgcccagcctac

SEQ ID NO: 6625 - DNA, 63 bp, synthetic construct
  misc_feature 1..63: note = Synthetic construct
  source 1..63: mol_type = other DNA
gcaacagatataaaagtccacggtgactacagagggccctacttctactactacatgggcgtc

SEQ ID NO: 6626 - DNA, 48 bp, synthetic construct
  misc_feature 1..48: note = Synthetic construct
  source 1..48: mol_type = other DNA
gcgagagcgtttgtgtatggttcggggagttgggctgcttttgacatt

SEQ ID NO: 6627 - DNA, 45 bp, synthetic construct
  misc_feature 1..45: note = Synthetic construct
  source 1..45: mol_type = other DNA
gcgagagatcgcaaagaattcgaaagacgtcactggttcgacccc

SEQ ID NO: 6628 - DNA, 54 bp, synthetic construct
  misc_feature 1..54: note = Synthetic construct
  source 1..54: mol_type = other DNA
gcgagggtaggggacgataacgatttttggagtggtcattccagctttgacttc

SEQ ID NO: 6629 - DNA, 54 bp, synthetic construct
  misc_feature 1..54: note = Synthetic construct
  source 1..54: mol_type = other DNA
gcgagagatgaaacggatgtgatggggttcagaatggggtactactttgactct

SEQ ID NO: 6630 - DNA, 45 bp, synthetic construct
  misc_feature 1..45: note = Synthetic construct
  source 1..45: mol_type = other DNA
gcaatcgcaggatcagatagtagctctggattttactttgactac

SEQ ID NO: 6631 - DNA, 42 bp, synthetic construct
  misc_feature 1..42: note = Synthetic construct
  source 1..42: mol_type = other DNA
gcaacccagacatatacttcggagagctcccggggtgacttc

SEQ ID NO: 6632 - DNA, 33 bp, synthetic construct
  misc_feature 1..33: note = Synthetic construct
  source 1..33: mol_type = other DNA
gcgggaggccgcgggggatatcacgctgactcc

SEQ ID NO: 6633 - DNA, 51 bp, synthetic construct
  misc_feature 1..51: note = Synthetic construct
  source 1..51: mol_type = other DNA
gcgcgaggacagactgtcggacgatactttaactggttaccccttcaacac

SEQ ID NO: 6634 - DNA, 48 bp, synthetic construct
  misc_feature 1..48: note = Synthetic construct
  source 1..48: mol_type = other DNA
gcgcgacacaggggacgtgggaattctgccggagtggggttcgacccc

SEQ ID NO: 6635 - DNA, 54 bp, synthetic construct
  misc_feature 1..54: note = Synthetic construct
  source 1..54: mol_type = other DNA
gcgagagatctttcggaagtggtgggagctgctgtttccgatgcttttaatgtc

SEQ ID NO: 6636 - DNA, 39 bp, synthetic construct
  misc_feature 1..39: note = Synthetic construct
  source 1..39: mol_type = other DNA
gcgagagcagatggctaccgaaagaaaatccttgactac

SEQ ID NO: 6637 - DNA, 45 bp, synthetic construct
  misc_feature 1..45: note = Synthetic construct
  source 1..45: mol_type = other DNA
gcgagacaatcaggaagtagtggttatatctcctattttaaatac

SEQ ID NO: 6638 - DNA, 45 bp, synthetic construct
  misc_feature 1..45: note = Synthetic construct
  source 1..45: mol_type = other DNA
gcgagaggtataagtggaattacctacccgtatcactttgactac

SEQ ID NO: 6639 - DNA, 63 bp, synthetic construct
  misc_feature 1..63: note = Synthetic construct
  source 1..63: mol_type = other DNA
gcgacattacgtatgatggattattatgatagtagtggtcattatccggactactttgactac

SEQ ID NO: 6640 - DNA, 48 bp, synthetic construct
  misc_feature 1..48: note = Synthetic construct
  source 1..48: mol_type = other DNA
gcgagacgcaacccttatggctccggccggggttataactttgactcc

SEQ ID NO: 6641 - DNA, 36 bp, synthetic construct
  misc_feature 1..36: note = Synthetic construct
  source 1..36: mol_type = other DNA
gcgagaactacccagtatttcttctacatggacgtc

SEQ ID NO: 6642 - DNA, 75 bp, synthetic construct
  misc_feature 1..75: note = Synthetic construct
  source 1..75: mol_type = other DNA
gcgcgacccgatagtggtgacgaactcatcaatccgggccggccaagtggttattacacgggggctattgatctg

SEQ ID NO: 6643 - DNA, 42 bp, synthetic construct
  misc_feature 1..42: note = Synthetic construct
  source 1..42: mol_type = other DNA
gcgagatcagtgaccagtggctggtatggtactctcgactat

SEQ ID NO: 6644 - DNA, 45 bp, synthetic construct
  misc_feature 1..45: note = Synthetic construct
  source 1..45: mol_type = other DNA
gggagaccgcgtaatagtgggagttattatgatgcttttgatata

SEQ ID NO: 6645 - DNA, 45 bp, synthetic construct
  misc_feature 1..45: note = Synthetic construct
  source 1..45: mol_type = other DNA
gcgagacattccttgtctaactttaaacaggcctggttcgacccc

SEQ ID NO: 6646 - DNA, 51 bp, synthetic construct
  misc_feature 1..51: note = Synthetic construct
  source 1..51: mol_type = other DNA
gcgagaaatccgggagatgatagtactggtcacccctcttactttaactac

SEQ ID NO: 6647 - DNA, 45 bp, synthetic construct
  misc_feature 1..45: note = Synthetic construct
  source 1..45: mol_type = other DNA
gcgagacaagagaggcgtatcggcagtggcaaccccttagagttc

SEQ ID NO: 6648 - DNA, 45 bp, synthetic construct
  misc_feature 1..45: note = Synthetic construct
  source 1..45: mol_type = other DNA
gtgagtcccggcgattgtagtggtggtacttgctacccggcctac

SEQ ID NO: 6649 - DNA, 36 bp, synthetic construct
  misc_feature 1..36: note = Synthetic construct
  source 1..36: mol_type = other DNA
gcgagacgatttccgaatagtgaacattttgtctac

SEQ ID NO: 6650 - DNA, 51 bp, synthetic construct
  misc_feature 1..51: note = Synthetic construct
  source 1..51: mol_type = other DNA
gcgagacatgtggcaactcgtccctactacttctactactacatggacgtc

SEQ ID NO: 6651 - DNA, 51 bp, synthetic construct
  misc_feature 1..51: note = Synthetic construct
  source 1..51: mol_type = other DNA
gcgcgacgtaatggttaccatgatagtagtgcttatggcggttttgatatc

SEQ ID NO: 6652 - DNA, 48 bp, synthetic construct
  misc_feature 1..48: note = Synthetic construct
  source 1..48: mol_type = other DNA
gcgagaggggaagatgcctacaatactgagcctgatgcttttgatatc

SEQ ID NO: 6653 - DNA, 36 bp, synthetic construct
  misc_feature 1..36: note = Synthetic construct
  source 1..36: mol_type = other DNA
gcgaaacatgaagcgcgtgattattactttgactcc

SEQ ID NO: 6654 - DNA, 27 bp, synthetic construct
  misc_feature 1..27: note = Synthetic construct
  source 1..27: mol_type = other DNA
gcgagacggaggagcttcgtggacgtc

SEQ ID NO: 6655 - DNA, 66 bp, synthetic construct
  misc_feature 1..66: note = Synthetic construct
  source 1..66: mol_type = other DNA
gcgagaagtagagttgtagtagtaccagctgctatgaccccctactactactactacatggacgtc

SEQ ID NO: 6656 - DNA, 54 bp, synthetic construct
  misc_feature 1..54: note = Synthetic construct
  source 1..54: mol_type = other DNA
gcgagacataagggaaggggacgtatagcagtggctggtaaagcttttgatatc

SEQ ID NO: 6657 - DNA, 36 bp, synthetic construct
  misc_feature 1..36: note = Synthetic construct
  source 1..36: mol_type = other DNA
gcgagacatcggccccactatggcctcatggacgtc

SEQ ID NO: 6658 - DNA, 36 bp, synthetic construct
  misc_feature 1..36: note = Synthetic construct
  source 1..36: mol_type = other DNA
gcgagacgtcaggctggagagggcccctttgactac

SEQ ID NO: 6659 - DNA, 48 bp, synthetic construct
  misc_feature 1..48: note = Synthetic construct
  source 1..48: mol_type = other DNA
gcgagactggattgtagtggtggtagctgctacccgcccatggacgtc

SEQ ID NO: 6660 - DNA, 54 bp, synthetic construct
  misc_feature 1..54: note = Synthetic construct
  source 1..54: mol_type = other DNA
gcgagatccgttcggggagtgggagattactactactactactacatggacgtc

SEQ ID NO: 6661 - DNA, 48 bp, synthetic construct
  misc_feature 1..48: note = Synthetic construct
  source 1..48: mol_type = other DNA
gcgagcgtcggctactatggttcggggagttctgatgcttttgatatc

SEQ ID NO: 6662 - DNA, 69 bp, synthetic construct
  misc_feature 1..69: note = Synthetic construct
  source 1..69: mol_type = other DNA
gcgagacgagggaaggatgataacagtgcttactacttggggaggacccgaggccgggtatttgactat

SEQ ID NO: 6663 - DNA, 33 bp, synthetic construct
  misc_feature 1..33: note = Synthetic construct
  source 1..33: mol_type = other DNA
gcgagacagggcggcagctaccgcattgactac

SEQ ID NO: 6664 - DNA, 51 bp, synthetic construct
  misc_feature 1..51: note = Synthetic construct
  source 1..51: mol_type = other DNA
gcgagagtgggggactacggtgactacggtagctactggtacttcgatctc

SEQ ID NO: 6665 - DNA, 39 bp, synthetic construct
  misc_feature 1..39: note = Synthetic construct
  source 1..39: mol_type = other DNA
gcccagagtgtaactggagctacagatgcttttgatatt

SEQ ID NO: 6666 - DNA, 42 bp, synthetic construct
  misc_feature 1..42: note = Synthetic construct
  source 1..42: mol_type = other DNA
gcgagattggggggtcctacggtgactccccgttttgactac

SEQ ID NO: 6667 - DNA, 45 bp, synthetic construct
  misc_feature 1..45: note = Synthetic construct
  source 1..45: mol_type = other DNA
gcgagactggcgatgaaggaatggagtgtcggtgcttttgatctt

SEQ ID NO: 6668 - DNA, 39 bp, synthetic construct
  misc_feature 1..39: note = Synthetic construct
  source 1..39: mol_type = other DNA
gcgagagacatgtggggccaccactacgcgttcgacccc

SEQ ID NO: 6669 - DNA, 48 bp, synthetic construct
  misc_feature 1..48: note = Synthetic construct
  source 1..48: mol_type = other DNA
gcccgccggtcgcagcagctcctggtccccggatgggcttttgatatc

SEQ ID NO: 6670 - DNA, 42 bp, synthetic construct
  misc_feature 1..42: note = Synthetic construct
  source 1..42: mol_type = other DNA
gcgagacttggggattacagtgtctccgatatggggaactac

SEQ ID NO: 6671 - DNA, 42 bp, synthetic construct
  misc_feature 1..42: note = Synthetic construct
  source 1..42: mol_type = other DNA
acgtttcggggggcctcttgggggagtcttcgttatagctat

SEQ ID NO: 6672 - DNA, 60 bp, synthetic construct
  misc_feature 1..60: note = Synthetic construct
  source 1..60: mol_type = other DNA
gcgaaagatgtggggtattgtagtagtggcagctgcttccgccccctggcttttcaaatc

SEQ ID NO: 6673 - DNA, 45 bp, synthetic construct
  misc_feature 1..45: note = Synthetic construct
  source 1..45: mol_type = other DNA
gccacagatcaatgggggtacggtgacttcgggaactttgactac

SEQ ID NO: 6674 - DNA, 45 bp, synthetic construct
  misc_feature 1..45: note = Synthetic construct
  source 1..45: mol_type = other DNA
acgcgggttttgtggttcgagggacgatatgatacttttgatgtt

SEQ ID NO: 6675 - DNA, 60 bp, synthetic construct
  misc_feature 1..60: note = Synthetic construct
  source 1..60: mol_type = other DNA
gcgtcccgctattgtcgtgctggcagctgctatcaccattactattactatatggacatc

SEQ ID NO: 6676 - DNA, 45 bp, synthetic construct
  misc_feature 1..45: note = Synthetic construct
  source 1..45: mol_type = other DNA
gcgaaagggggcggttgtagtggtgattgctattttcccctcgac

SEQ ID NO: 6677 - DNA, 48 bp, synthetic construct
  misc_feature 1..48: note = Synthetic construct
  source 1..48: mol_type = other DNA
gcgagaggcctggggtattacgatattttgactggtgcttttgactac

SEQ ID NO: 6678 - DNA, 54 bp, synthetic construct
  misc_feature 1..54: note = Synthetic construct
  source 1..54: mol_type = other DNA
gcgaaagatagatcagcctccatatatggtgcggggactcccgcccttgactac

SEQ ID NO: 6679 - DNA, 36 bp, synthetic construct
  misc_feature 1..36: note = Synthetic construct
  source 1..36: mol_type = other DNA
gcgaaagatcgtgacttctactacttcatagacgtc

SEQ ID NO: 6680 - DNA, 45 bp, synthetic construct
  misc_feature 1..45: note = Synthetic construct
  source 1..45: mol_type = other DNA
gcgaaggcgcgcgtaccagctgctatcagattctactttgactcc

SEQ ID NO: 6681 - DNA, 33 bp, synthetic construct
  misc_feature 1..33: note = Synthetic construct
  source 1..33: mol_type = other DNA
gcgagagtcactaggttgaactggttcgacccc

SEQ ID NO: 6682 - DNA, 42 bp, synthetic construct
  misc_feature 1..42: note = Synthetic construct
  source 1..42: mol_type = other DNA
gcgcgaaatgaaggatacagctattctaactacatggacgtc

SEQ ID NO: 6683 - DNA, 60 bp, synthetic construct
  misc_feature 1..60: note = Synthetic construct
  source 1..60: mol_type = other DNA
gcgagatccccccccccctattactacgccagtagtggttattacttcgcctttgactac

SEQ ID NO: 6684 - DNA, 51 bp, synthetic construct
  misc_feature 1..51: note = Synthetic construct
  source 1..51: mol_type = other DNA
gcgagagagaagaacttgtatagtggctacgatccgacgggcttaggctac

SEQ ID NO: 6685 - DNA, 39 bp, synthetic construct
  misc_feature 1..39: note = Synthetic construct
  source 1..39: mol_type = other DNA
gcgacctctggttcgggggcttattataaccctgactac

SEQ ID NO: 6686 - DNA, 57 bp, synthetic construct
  misc_feature 1..57: note = Synthetic construct
  source 1..57: mol_type = other DNA
gcgacagattccacattttacgatgttttgactactatctgggggtactttgactac

SEQ ID NO: 6687 - DNA, 33 bp, synthetic construct
  misc_feature 1..33: note = Synthetic construct
  source 1..33: mol_type = other DNA
gcgacagatagtgcctacgagtactttgactct

SEQ ID NO: 6688 - DNA, 42 bp, synthetic construct
  misc_feature 1..42: note = Synthetic construct
  source 1..42: mol_type = other DNA
gcgagaagggaggcggcgatgagtaatggtaaccttgactac

SEQ ID NO: 6689 - DNA, 54 bp, synthetic construct
  misc_feature 1..54: note = Synthetic construct
  source 1..54: mol_type = other DNA
gcgagagaaccatattgtggtggtgattgcccgccgggatattggttcgacccc

SEQ ID NO: 6690 - DNA, 54 bp, synthetic construct
  misc_feature 1..54: note = Synthetic construct
  source 1..54: mol_type = other DNA
gcgagagaaggggttaggagcggatacagctatgcctttgatgcttttgatatc

SEQ ID NO: 6691 - DNA, 39 bp, synthetic construct
  misc_feature 1..39: note = Synthetic construct
  source 1..39: mol_type = other DNA
gcgagagaatactatggttcggggagttattatacttgg

SEQ ID NO: 6692 - DNA, 48 bp, synthetic construct
  misc_feature 1..48: note = Synthetic construct
  source 1..48: mol_type = other DNA
gcgagagatccgaggaggaatcactatgatagtagtggctctgactac

SEQ ID NO: 6693 - DNA, 36 bp, synthetic construct
  misc_feature 1..36: note = Synthetic construct
  source 1..36: mol_type = other DNA
gcgagagattttttgggagctagctactttgactac

SEQ ID NO: 6694 - DNA, 57 bp, synthetic construct
  misc_feature 1..57: note = Synthetic construct
  source 1..57: mol_type = other DNA
gcgagatccgcccagctctatgatagtagtggttattcggggggcctctttgactac

SEQ ID NO: 6695 - DNA, 48 bp, synthetic construct
  misc_feature 1..48: note = Synthetic construct
  source 1..48: mol_type = other DNA
gcgcctttttcgctctacggggggaactactactactacatggacgtc

SEQ ID NO: 6696 - DNA, 36 bp, synthetic construct
  misc_feature 1..36: note = Synthetic construct
  source 1..36: mol_type = other DNA
gcgacttcggatcggggaacgactacggtgactcct

SEQ ID NO: 6697 - DNA, 78 bp, synthetic construct
  misc_feature 1..78: note = Synthetic construct
  source 1..78: mol_type = other DNA
gcgagattttcggccggaaggcctcaatattgtagtggtggtacctgctaccctccggacttctattacatggacgtc

SEQ ID NO: 6698 - DNA, 51 bp, synthetic construct
  misc_feature 1..51: note = Synthetic construct
  source 1..51: mol_type = other DNA
gcgagagatcgaggtagcagcagctggtacgggggcgatgcttttgatttc

SEQ ID NO: 6699 - DNA, 24 bp, synthetic construct
  misc_feature 1..24: note = Synthetic construct
  source 1..24: mol_type = other DNA
gcgagagggggactacggcgaaac

SEQ ID NO: 6700 - DNA, 33 bp, synthetic construct
  misc_feature 1..33: note = Synthetic construct
  source 1..33: mol_type = other DNA
gcgagagatgaccgctacggtgaccttgatttt

SEQ ID NO: 6701 - DNA, 69 bp, synthetic construct
  misc_feature 1..69: note = Synthetic construct
  source 1..69: mol_type = other DNA
gcgagagggcccaattactatgatagtagaaatcattactcgccaccactcgaccagtacatggacgtc

SEQ ID NO: 6702 - DNA, 30 bp, synthetic construct
  misc_feature 1..30: note = Synthetic construct
  source 1..30: mol_type = other DNA
gcgagcgggaacggtgacttcgtgtacttc

SEQ ID NO: 6703 - DNA, 57 bp, synthetic construct
  misc_feature 1..57: note = Synthetic construct
  source 1..57: mol_type = other DNA
gcgagagaggacagagctgtggctggtccctggtcctcctactacttcatggacgtc

SEQ ID NO: 6704 - DNA, 21 bp, synthetic construct
  misc_feature 1..21: note = Synthetic construct
  source 1..21: mol_type = other DNA
gcgagagacgagaacgactac

SEQ ID NO: 6705 - DNA, 36 bp, synthetic construct
  misc_feature 1..36: note = Synthetic construct
  source 1..36: mol_type = other DNA
gcgagagatacaggatatacccggaaacttgactac

SEQ ID NO: 6706 - DNA, 63 bp, synthetic construct
  misc_feature 1..63: note = Synthetic construct
  source 1..63: mol_type = other DNA
gcgagagatcactacggtggtaaatccggaagcggatactactactactactacatggacgtc

SEQ ID NO: 6707 - DNA, 21 bp, synthetic construct
  misc_feature 1..21: note = Synthetic construct
  source 1..21: mol_type = other DNA
gcgagagctttcctggacgtc

SEQ ID NO: 6708 - DNA, 57 bp, synthetic construct
  misc_feature 1..57: note = Synthetic construct
  source 1..57: mol_type = other DNA
gcgagagggggcgactacgggggaacctgggcgtactactactactacatggacgtc

SEQ ID NO: 6709 - DNA, 60 bp, synthetic construct
  misc_feature 1..60: note = Synthetic construct
  source 1..60: mol_type = other DNA
gcgagaggtccttattactatgatagtagtagttattacccaaaagaatacttccagcac

SEQ ID NO: 6710 - DNA, 60 bp, synthetic construct
  misc_feature 1..60: note = Synthetic construct
  source 1..60: mol_type = other DNA
gcgagagttggtgatgatagtagtggttggggttactactactactactacatggacgtc

SEQ ID NO: 6711 - DNA, 42 bp, synthetic construct
  misc_feature 1..42: note = Synthetic construct
  source 1..42: mol_type = other DNA
gcgagggagaattactatggttcggggagttatttgggctac

SEQ ID NO: 6712 - DNA, 27 bp, synthetic construct
  misc_feature 1..27: note = Synthetic construct
  source 1..27: mol_type = other DNA
gcgaggggttatggttcgggggactac

SEQ ID NO: 6713 - DNA, 54 bp, synthetic construct
  misc_feature 1..54: note = Synthetic construct
  source 1..54: mol_type = other DNA
gcgagagttgggagtctttttgaactaaatggccgggagtcgggtctcgacccc

SEQ ID NO: 6714 - DNA, 48 bp, synthetic construct
  misc_feature 1..48: note = Synthetic construct
  source 1..48: mol_type = other DNA
acgagagttttcggattttcggcttggaacttcggtgacttttactac

SEQ ID NO: 6715 - DNA, 60 bp, synthetic construct
  misc_feature 1..60: note = Synthetic construct
  source 1..60: mol_type = other DNA
gcgagagatcccctttattactatgatagtggtggttattaccatgatgcttttgatatc

SEQ ID NO: 6716 - DNA, 39 bp, synthetic construct
  misc_feature 1..39: note = Synthetic construct
  source 1..39: mol_type = other DNA
gcgagtcgccccgaatatacgtttggttactttgactcc

SEQ ID NO: 6717 - DNA, 36 bp, synthetic construct
  misc_feature 1..36: note = Synthetic construct
  source 1..36: mol_type = other DNA
gcgagagacatagactggaactacggacttgactcc

SEQ ID NO: 6718 - DNA, 51 bp, synthetic construct
  misc_feature 1..51: note = Synthetic construct
  source 1..51: mol_type = other DNA
gcgaaagtgggcaaccgggtcccgacgaggaggggtggggcttttgatatt

SEQ ID NO: 6719 - DNA, 60 bp, synthetic construct
  misc_feature 1..60: note = Synthetic construct
  source 1..60: mol_type = other DNA
gcgagagatcgggcacactgtactaatagcagctgcttttcggggggctggttcgactcc

SEQ ID NO: 6720 - DNA, 60 bp, synthetic construct
  misc_feature 1..60: note = Synthetic construct
  source 1..60: mol_type = other DNA
gcgagaggttgggtggggcaggaccccactgcttaccgcacagggggctactttgactcc

SEQ ID NO: 6721 - DNA, 60 bp, synthetic construct
  misc_feature 1..60: note = Synthetic construct
  source 1..60: mol_type = other DNA
gcgagagatttggacggttactatggttcgggaagttattatcccgatgcttttgatatc

SEQ ID NO: 6722 - DNA, 45 bp, synthetic construct
  misc_feature 1..45: note = Synthetic construct
  source 1..45: mol_type = other DNA
gcgagagtggtcggcagcagctcctactactaccacattgacgtc

SEQ ID NO: 6723 - DNA, 39 bp, synthetic construct
  misc_feature 1..39: note = Synthetic construct
  source 1..39: mol_type = other DNA
gcgagagggggagaatcttactactggtacatggacgtc

SEQ ID NO: 6724 - DNA, 48 bp, synthetic construct
  misc_feature 1..48: note = Synthetic construct
  source 1..48: mol_type = other DNA
gcaagagaagcccgctatggttcggggagcccttggtacatggacgtc

SEQ ID NO: 6725 - DNA, 45 bp, synthetic construct
  misc_feature 1..45: note = Synthetic construct
  source 1..45: mol_type = other DNA
gcgagagccatagagatgtctactacggatggtgctttagatctc

SEQ ID NO: 6726 - DNA, 39 bp, synthetic construct
  misc_feature 1..39: note = Synthetic construct
  source 1..39: mol_type = other DNA
gtgcgtgctgacgactcttatcactactacatgttggac

SEQ ID NO: 6727 - DNA, 63 bp, synthetic construct
  misc_feature 1..63: note = Synthetic construct
  source 1..63: mol_type = other DNA
gtgagagataattactttgatagtagtggttattacctttacggaccccactactttgactac

SEQ ID NO: 6728 - DNA, 60 bp, synthetic construct
  misc_feature 1..60: note = Synthetic construct
  source 1..60: mol_type = other DNA
gcgaggttccacagggaaacatactgtggtggtgattgctattcggggacttttgatgtc

SEQ ID NO: 6729 - DNA, 66 bp, synthetic construct
  misc_feature 1..66: note = Synthetic construct
  source 1..66: mol_type = other DNA
gtgaggggggccccacattcgcagtataccagtttttggttctatagttactacttcatggacgtc

SEQ ID NO: 6730 - DNA, 33 bp, synthetic construct
  misc_feature 1..33: note = Synthetic construct
  source 1..33: mol_type = other DNA
accacagtacataccattaggggctttgactac

SEQ ID NO: 6731 - DNA, 42 bp, synthetic construct
  misc_feature 1..42: note = Synthetic construct
  source 1..42: mol_type = other DNA
gtgcgagcttggcagcaactggtatggggaggtcttgatatc

SEQ ID NO: 6732 - DNA, 57 bp, synthetic construct
  misc_feature 1..57: note = Synthetic construct
  source 1..57: mol_type = other DNA
gcgagagatctccgagatgagagtgttgacgagtactactattactacatggacgtc

SEQ ID NO: 6733 - DNA, 54 bp, synthetic construct
  misc_feature 1..54: note = Synthetic construct
  source 1..54: mol_type = other DNA
gcgagagaagggatggctacaaggggttactactactactactacatggacgtc

SEQ ID NO: 6734 - DNA, 33 bp, synthetic construct
  misc_feature 1..33: note = Synthetic construct
  source 1..33: mol_type = other DNA
gcgagagacctcgtagtaggtgcttttgatatc

SEQ ID NO: 6735 - DNA, 72 bp, synthetic construct
  misc_feature 1..72: note = Synthetic construct
  source 1..72: mol_type = other DNA
gcgagaggccatgatagtagtggttattacttttttttgggggtgggctactactactactacatggacgtc

SEQ ID NO: 6736 - DNA, 57 bp, synthetic construct
  misc_feature 1..57: note = Synthetic construct
  source 1..57: mol_type = other DNA
gcgagaggtcttatagcagatagtagtggttattacaagttacggctatttgactac

SEQ ID NO: 6737 - DNA, 39 bp, synthetic construct
  misc_feature 1..39: note = Synthetic construct
  source 1..39: mol_type = other DNA
gcgagatcaccaacgggttatccctactactttgactac

SEQ ID NO: 6738 - DNA, 39 bp, synthetic construct
  misc_feature 1..39: note = Synthetic construct
  source 1..39: mol_type = other DNA
gcgagagatcctgactatgatactagtggtccagactac

SEQ ID NO: 6739 - DNA, 39 bp, synthetic construct
  misc_feature 1..39: note = Synthetic construct
  source 1..39: mol_type = other DNA
gcgagagatgatggaggggggtactggggcttagacctc

SEQ ID NO: 6740 - DNA, 75 bp, synthetic construct
  misc_feature 1..75: note = Synthetic construct
  source 1..75: mol_type = other DNA
gcgtccctaggacattgtcgtagtggcagctgtttagtccgaccagctgaggtctcgcagacctggttcgacccc

SEQ ID NO: 6741 - DNA, 48 bp, synthetic construct
  misc_feature 1..48: note = Synthetic construct
  source 1..48: mol_type = other DNA
gcgaaagatcgcagcctctccggatatagcagcagttgccacctcgac

SEQ ID NO: 6742 - DNA, 48 bp, synthetic construct
  misc_feature 1..48: note = Synthetic construct
  source 1..48: mol_type = other DNA
gcgagaggcctttatgagggatttgaatcaagtggtttttacagattc

SEQ ID NO: 6743 - DNA, 39 bp, synthetic construct
  misc_feature 1..39: note = Synthetic construct
  source 1..39: mol_type = other DNA
gttaaagctgagggcccgtatggtggctactttgaccaa

SEQ ID NO: 6744 - DNA, 39 bp, synthetic construct
  misc_feature 1..39: note = Synthetic construct
  source 1..39: mol_type = other DNA
gcgaaagtgaagtttggctatggctcccattttgatatc

SEQ ID NO: 6745 - DNA, 45 bp, synthetic construct
  misc_feature 1..45: note = Synthetic construct
  source 1..45: mol_type = other DNA
gctagagtagaatcgtactactatgacagtagtgctgttgactac

SEQ ID NO: 6746 - DNA, 51 bp, synthetic construct
  misc_feature 1..51: note = Synthetic construct
  source 1..51: mol_type = other DNA
gcgaaatacaaccctcggggctacggtgactacgcggggtacctcgacccc

SEQ ID NO: 6747 - DNA, 45 bp, synthetic construct
  misc_feature 1..45: note = Synthetic construct
  source 1..45: mol_type = other DNA
gcgaaaatcaggccaatgactacggtgacgagctcctttgactac

SEQ ID NO: 6748 - DNA, 54 bp, synthetic construct
  misc_feature 1..54: note = Synthetic construct
  source 1..54: mol_type = other DNA
gcgagagataccgctacattacgaagtcacgggggggccggctggttcgccccc

SEQ ID NO: 6749 - DNA, 48 bp, synthetic construct
  misc_feature 1..48: note = Synthetic construct
  source 1..48: mol_type = other DNA
gcgaaaccggggggctatggttcggggagtgatggtgcttttgatatc

SEQ ID NO: 6750 - DNA, 45 bp, synthetic construct
  misc_feature 1..45: note = Synthetic construct
  source 1..45: mol_type = other DNA
acgaatattcgagacgcatacagtgtcggttatggacttgattcc

SEQ ID NO: 6751 - DNA, 42 bp, synthetic construct
  misc_feature 1..42: note = Synthetic construct
  source 1..42: mol_type = other DNA
gcgaaaaggcaggcttatagcagctcgtcccccttgggccac

SEQ ID NO: 6752 - DNA, 51 bp, synthetic construct
  misc_feature 1..51: note = Synthetic construct
  source 1..51: mol_type = other DNA
gcgaaagatgtcagcaactacgggatttactattactactacatggacgtc

SEQ ID NO: 6753 - DNA, 42 bp, synthetic construct
  misc_feature 1..42: note = Synthetic construct
  source 1..42: mol_type = other DNA
gcgagttcggatgactacagtaactacggtccatttgactac

SEQ ID NO: 6754 - DNA, 48 bp, synthetic construct
  misc_feature 1..48: note = Synthetic construct
  source 1..48: mol_type = other DNA
gctagaggtccccccagtggatacacctttggttcctactttgactcc

SEQ ID NO: 6755 - DNA, 48 bp, synthetic construct
  misc_feature 1..48: note = Synthetic construct
  source 1..48: mol_type = other DNA
gcgagaggagtcactagtggttaccactcttaccccctccttgacttc

SEQ ID NO: 6756 - DNA, 60 bp, synthetic construct
  misc_feature 1..60: note = Synthetic construct
  source 1..60: mol_type = other DNA
gcccgagctcggggaacatataactgggactctggggcctactcttacttcatggacgtc

SEQ ID NO: 6757 - DNA, 45 bp, synthetic construct
  misc_feature 1..45: note = Synthetic construct
  source 1..45: mol_type = other DNA
gcgaaaattaggccaatgactacggtgacgagcgcgtttgacctc

SEQ ID NO: 6758 - DNA, 33 bp, synthetic construct
  misc_feature 1..33: note = Synthetic construct
  source 1..33: mol_type = other DNA
ggaagagatccgggatacagtagcttggacgtc

SEQ ID NO: 6759 - DNA, 60 bp, synthetic construct
  misc_feature 1..60: note = Synthetic construct
  source 1..60: mol_type = other DNA
gctcgaggtcggggaacctatgactggaactccggggcctactactacttcatggacgtg

SEQ ID NO: 6760 - DNA, 78 bp, synthetic construct
  misc_feature 1..78: note = Synthetic construct
  source 1..78: mol_type = other DNA
acgagaggaggcggccatttgctccgggcaggctatgagtggtccccgggagatcaaacattccacttcatgaacgtc

SEQ ID NO: 6761 - DNA, 30 bp, synthetic construct
  misc_feature 1..30: note = Synthetic construct
  source 1..30: mol_type = other DNA
gcgacttatcccacgggcattttgaactcc

SEQ ID NO: 6762 - DNA, 39 bp, synthetic construct
  misc_feature 1..39: note = Synthetic construct
  source 1..39: mol_type = other DNA
gcggcctcttacaatatccagggtttggtccttgactac

SEQ ID NO: 6763 - DNA, 45 bp, synthetic construct
  misc_feature 1..45: note = Synthetic construct
  source 1..45: mol_type = other DNA
gcgaaacacaaaggggagtcctatatttcttgggctcttgatttg

SEQ ID NO: 6764 - DNA, 54 bp, synthetic construct
  misc_feature 1..54: note = Synthetic construct
  source 1..54: mol_type = other DNA
gcgaaaaccccctcaagaagtgtaagcagtagctggccctattactttgactat

SEQ ID NO: 6765 - DNA, 66 bp, synthetic construct
  misc_feature 1..66: note = Synthetic construct
  source 1..66: mol_type = other DNA
gcgaggaacgtatattgtagtggtggtagctgctactccgactactactactactacatggacgtc

SEQ ID NO: 6766 - DNA, 48 bp, synthetic construct
  misc_feature 1..48: note = Synthetic construct
  source 1..48: mol_type = other DNA
gcgagaccagaaagtgggagctactactcgccctggttcttcgaatgc

SEQ ID NO: 6767 - DNA, 42 bp, synthetic construct
  misc_feature 1..42: note = Synthetic construct
  source 1..42: mol_type = other DNA
gcgagagacaagtatagtgggaccacggatgcttttgatatc

SEQ ID NO: 6768 - DNA, 45 bp, synthetic construct
  misc_feature 1..45: note = Synthetic construct
  source 1..45: mol_type = other DNA
gcgagagacccacgagcgtataccgatccccgctggttcgacccc

SEQ ID NO: 6769 - DNA, 39 bp, synthetic construct
  misc_feature 1..39: note = Synthetic construct
  source 1..39: mol_type = other DNA
gcgagagcgggggggttcatggttcggggactcgactac

SEQ ID NO: 6770 - DNA, 57 bp, synthetic construct
  misc_feature 1..57: note = Synthetic construct
  source 1..57: mol_type = other DNA
gcgagagaaataagaggcgtgggctatagtagtggttattacggctggttcgacccc

SEQ ID NO: 6771 - DNA, 39 bp, synthetic construct
  misc_feature 1..39: note = Synthetic construct
  source 1..39: mol_type = other DNA
gcgagagtccgtacgtccctctactactacatggacgtc

SEQ ID NO: 6772 - DNA, 45 bp, synthetic construct
  misc_feature 1..45: note = Synthetic construct
  source 1..45: mol_type = other DNA
gcgagagatggtgtactactacgaagcttaaagcggttcgacccc

SEQ ID NO: 6773 - DNA, 39 bp, synthetic construct
  misc_feature 1..39: note = Synthetic construct
  source 1..39: mol_type = other DNA
gcgagagggtgggcaacagatggctactacatggacctc

SEQ ID NO: 6774 - DNA, 66 bp, synthetic construct
  misc_feature 1..66: note = Synthetic construct
  source 1..66: mol_type = other DNA
gcgaaagggggtccagatgcggctgtctggacgaattctcaactctcttttcatccctttgtctcg

SEQ ID NO: 6775 - DNA, 42 bp, synthetic construct
  misc_feature 1..42: note = Synthetic construct
  source 1..42: mol_type = other DNA
gcgaaagtaagactgatacggcccgaggggttctttgactat

SEQ ID NO: 6776 - DNA, 54 bp, synthetic construct
  misc_feature 1..54: note = Synthetic construct
  source 1..54: mol_type = other DNA
gcgaaagacctctcttgtggtggtggtagctgtttttcccgggtttctgactac

SEQ ID NO: 6777 - DNA, 84 bp, synthetic construct
  misc_feature 1..84: note = Synthetic construct
  source 1..84: mol_type = other DNA
gcgagaggcaaaacttcttactatgatagagacaaaccgttttactatgatagtagtggtaagggtccccactgctttgactac

SEQ ID NO: 6778 - DNA, 48 bp, synthetic construct
  misc_feature 1..48: note = Synthetic construct
  source 1..48: mol_type = other DNA
accacagattggggttcgacgactcattatattcaggcttttgatatc

SEQ ID NO: 6779 - DNA, 45 bp, synthetic construct
  misc_feature 1..45: note = Synthetic construct
  source 1..45: mol_type = other DNA
actagagattgggactactatgatagtagtggttactccagtcac

SEQ ID NO: 6780 - DNA, 57 bp, synthetic construct
  misc_feature 1..57: note = Synthetic construct
  source 1..57: mol_type = other DNA
actagaccggcggctgatagcagcagctggtacagccgccttacctactttgactac

SEQ ID NO: 6781 - DNA, 36 bp, synthetic construct
  misc_feature 1..36: note = Synthetic construct
  source 1..36: mol_type = other DNA
actagagagctctccatagagggagcttttgatatc

SEQ ID NO: 6782 - DNA, 51 bp, synthetic construct
  misc_feature 1..51: note = Synthetic construct
  source 1..51: mol_type = other DNA
actagagatcttctcggggtcttctcggaggggattggttggttcgacccc

SEQ ID NO: 6783 - DNA, 54 bp, synthetic construct
  misc_feature 1..54: note = Synthetic construct
  source 1..54: mol_type = other DNA
actagagccccggggaggggatttaggtatggttcggggagccactttgactac

SEQ ID NO: 6784 - DNA, 42 bp, synthetic construct
  misc_feature 1..42: note = Synthetic construct
  source 1..42: mol_type = other DNA
gcgagaggggtggctacgacctaccaatatcactttgacttc

SEQ ID NO: 6785 - DNA, 57 bp, synthetic construct
  misc_feature 1..57: note = Synthetic construct
  source 1..57: mol_type = other DNA
gcgagagatcgcatcagttttacgactggtgtggtcccggactggaacttcgatctc

SEQ ID NO: 6786 - DNA, 54 bp, synthetic construct
  misc_feature 1..54: note = Synthetic construct
  source 1..54: mol_type = other DNA
gcgaaacatttaacgaccagtattgttgtggtggtagctgcacgatttgtctcc

SEQ ID NO: 6787 - DNA, 42 bp, synthetic construct
  misc_feature 1..42: note = Synthetic construct
  source 1..42: mol_type = other DNA
gcgaagttggactacagtaacttacgacagagatttgactac

SEQ ID NO: 6788 - DNA, 36 bp, synthetic construct
  misc_feature 1..36: note = Synthetic construct
  source 1..36: mol_type = other DNA
gcgaaagatccctcctctatagtgggagccttcgac

SEQ ID NO: 6789 - DNA, 27 bp, synthetic construct
  misc_feature 1..27: note = Synthetic construct
  source 1..27: mol_type = other DNA
gcgaagcctatagcaggtcgtccttcc

SEQ ID NO: 6790 - DNA, 45 bp, synthetic construct
  misc_feature 1..45: note = Synthetic construct
  source 1..45: mol_type = other DNA
gcgaaaccgaaggaggaagagccctcatactactacatggacgtc

SEQ ID NO: 6791 - DNA, 33 bp, synthetic construct
  misc_feature 1..33: note = Synthetic construct
  source 1..33: mol_type = other DNA
gcgaaagataaacgggctgcccccttagactac

SEQ ID NO: 6792 - DNA, 51 bp, synthetic construct
  misc_feature 1..51: note = Synthetic construct
  source 1..51: mol_type = other DNA
gcgaaagattactatggttcggggacttattatatgggagcttttgatatc

SEQ ID NO: 6793 - DNA, 42 bp, synthetic construct
  misc_feature 1..42: note = Synthetic construct
  source 1..42: mol_type = other DNA
gccagggaggacagcagtggctggtatgatgcttttgatatc

SEQ ID NO: 6794 - DNA, 45 bp, synthetic construct
  misc_feature 1..45: note = Synthetic construct
  source 1..45: mol_type = other DNA
gcgaaacgggggcctgatagtagtgggtcgggcgcttttgatatc

SEQ ID NO: 6795 - DNA, 42 bp, synthetic construct
  misc_feature 1..42: note = Synthetic construct
  source 1..42: mol_type = other DNA
gcgaaagagggtagtggttattactcaaactggttcgacccc

SEQ ID NO: 6796 - DNA, 51 bp, synthetic construct
  misc_feature 1..51: note = Synthetic construct
  source 1..51: mol_type = other DNA
gcgaaagatcgagggaagatttactatgatagtagtggccaacaggactac

SEQ ID NO: 6797 - DNA, 54 bp, synthetic construct
  misc_feature 1..54: note = Synthetic construct
  source 1..54: mol_type = other DNA
gcgaaagatcgggcattacgatattttgactggttatttgatgcttttgatatc

SEQ ID NO: 6798 - DNA, 39 bp, synthetic construct
  misc_feature 1..39: note = Synthetic construct
  source 1..39: mol_type = other DNA
gcgaaagccccaggatatagcaatactgcttttgatttc

SEQ ID NO: 6799 - DNA, 45 bp, synthetic construct
  misc_feature 1..45: note = Synthetic construct
  source 1..45: mol_type = other DNA
gcgaaagtcggggacgtattacgatattttgactggtatgactac

SEQ ID NO: 6800 - DNA, 42 bp, synthetic construct
  misc_feature 1..42: note = Synthetic construct
  source 1..42: mol_type = other DNA
gcgaaatgggggctatggttcggggagttggactttgactac

SEQ ID NO: 6801 - DNA, 45 bp, synthetic construct
  misc_feature 1..45: note = Synthetic construct
  source 1..45: mol_type = other DNA
gcgaatcccgattacgatattttgactgtgaactggttcgacccc

SEQ ID NO: 6802 - DNA, 30 bp, synthetic construct
  misc_feature 1..30: note = Synthetic construct
  source 1..30: mol_type = other DNA
gcgaatcttataggagggtactttggctac

SEQ ID NO: 6803 - DNA, 63 bp, synthetic construct
  misc_feature 1..63: note = Synthetic construct
  source 1..63: mol_type = other DNA
gcgaagacagcatattgtggtggggattgctcttctagagtcactgcatacttctttgactcc

SEQ ID NO: 6804 - DNA, 42 bp, synthetic construct
  misc_feature 1..42: note = Synthetic construct
  source 1..42: mol_type = other DNA
gcgaaatcccgggcagtggctgggtacgattactttgactac

SEQ ID NO: 6805 - DNA, 42 bp, synthetic construct
  misc_feature 1..42: note = Synthetic construct
  source 1..42: mol_type = other DNA
gcgagaaggcagggctacagtagttcgtccccgttgaaatac

SEQ ID NO: 6806 - DNA, 54 bp, synthetic construct
  misc_feature 1..54: note = Synthetic construct
  source 1..54: mol_type = other DNA
gcgagagacttttggggttactatggttcggggattagaaaagagtttgatatc

SEQ ID NO: 6807 - DNA, 54 bp, synthetic construct
  misc_feature 1..54: note = Synthetic construct
  source 1..54: mol_type = other DNA
gcgagtcgaggaattaacggggggttcggggaagatgaggaatacttccaccac

SEQ ID NO: 6808 - DNA, 42 bp, synthetic construct; identical to SEQ ID NO: 1813
  misc_feature 1..42: note = Synthetic construct
  source 1..42: mol_type = other DNA

SEQ ID NO: 6809 - DNA, 60 bp, synthetic construct
  misc_feature 1..60: note = Synthetic construct
  source 1..60: mol_type = other DNA
gcgagagatgggtcttgtgattacatttgggggggttatcgttatgatgcttttgatatt

SEQ ID NO: 6810 - DNA, 51 bp, synthetic construct
  misc_feature 1..51: note = Synthetic construct
  source 1..51: mol_type = other DNA
gcgagccatccttatgggaggtatagcagtggctggggggcctttgactac

SEQ ID NO: 6811 - DNA, 60 bp, synthetic construct
  misc_feature 1..60: note = Synthetic construct
  source 1..60: mol_type = other DNA
gcgagacagcgaagcgagtggatagtagtggttattacgggctactactacatggacgtc

SEQ ID NO: 6812 - DNA, 66 bp, synthetic construct
  misc_feature 1..66: note = Synthetic construct
  source 1..66: mol_type = other DNA
gcgagagatcgcggacaccccaattactatggttcggggagttattaccgctactactttgactac

SEQ ID NO: 6813 - DNA, 33 bp, synthetic construct
  misc_feature 1..33: note = Synthetic construct
  source 1..33: mol_type = other DNA
gcgcgacggtcgtatagtggctactttgactcc

SEQ ID NO: 6814 - DNA, 30 bp, synthetic construct
  misc_feature 1..30: note = Synthetic construct
  source 1..30: mol_type = other DNA
gcgaccctgaagtggaattccttagactcc

SEQ ID NO: 6815 - DNA, 51 bp, synthetic construct
  misc_feature 1..51: note = Synthetic construct
  source 1..51: mol_type = other DNA
accacagggttcgattttggagtggttattattgtcgatggcatggacgtc

SEQ ID NO: 6816 - DNA, 63 bp, synthetic construct
  misc_feature 1..63: note = Synthetic construct
  source 1..63: mol_type = other DNA
accacagtcccttattgtagtggtggtagctgctacggggactactactactacatggacgtc

SEQ ID NO: 6817 - DNA, 54 bp, synthetic construct
  misc_feature 1..54: note = Synthetic construct
  source 1..54: mol_type = other DNA
accacctcaatcgaattactatggttcggggagcccctcggcgcttttgatatc

SEQ ID NO: 6818 - DNA, 45 bp, synthetic construct
  misc_feature 1..45: note = Synthetic construct
  source 1..45: mol_type = other DNA
accactttacggtcaggggactactacttctactacatggacgtc

SEQ ID NO: 6819 - DNA, 42 bp, synthetic construct
  misc_feature 1..42: note = Synthetic construct
  source 1..42: mol_type = other DNA
accacagagggcggcagtggctggtttgggtactttgactac

SEQ ID NO: 6820 - DNA, 24 bp, synthetic construct
  misc_feature 1..24: note = Synthetic construct
  source 1..24: mol_type = other DNA
agtagagactggggcattgcactc

SEQ ID NO: 6821 - DNA, 60 bp, synthetic construct
  misc_feature 1..60: note = Synthetic construct
  source 1..60: mol_type = other DNA
gcgaaagatgggggaagaacgtcttactatgatactagtgcttattactactttgactac

SEQ ID NO: 6822 - DNA, 63 bp, synthetic construct
  misc_feature 1..63: note = Synthetic construct
  source 1..63: mol_type = other DNA
gcgagagaagatcgtggatattgtagtagtggtagctgctactttgtagggacctttgactac

SEQ ID NO: 6823 - DNA, 27 bp, synthetic construct
  misc_feature 1..27: note = Synthetic construct
  source 1..27: mol_type = other DNA
gcgcgagggtcccgggaggttctctac

SEQ ID NO: 6824 - DNA, 54 bp, synthetic construct
  misc_feature 1..54: note = Synthetic construct
  source 1..54: mol_type = other DNA
gcgagaggaggggcccattattgtggtggtgactgcccgagggcttttgacatc

SEQ ID NO: 6825 - DNA, 33 bp, synthetic construct
  misc_feature 1..33: note = Synthetic construct
  source 1..33: mol_type = other DNA
gcgagtctctggtcccgttactactttgacttc

SEQ ID NO: 6826 - DNA, 42 bp, synthetic construct
  misc_feature 1..42: note = Synthetic construct
  source 1..42: mol_type = other DNA
gcgagagcgacgggtgggaccttctactaccatatggacgtc

SEQ ID NO: 6827 - DNA, 81 bp, synthetic construct
  misc_feature 1..81: note = Synthetic construct
  source 1..81: mol_type = other DNA
gtaaaacaggctctgaatactgggtacgattcgactttttcaccctttgtctctatctactactacttctacatggacgtc

SEQ ID NO: 6828 - DNA, 48 bp, synthetic construct
  misc_feature 1..48: note = Synthetic construct
  source 1..48: mol_type = other DNA
gggagactctgccaggcgttttggtccggggaacattgtggggactcc

SEQ ID NO: 6829 - DNA, 57 bp, synthetic construct
  misc_feature 1..57: note = Synthetic construct
  source 1..57: mol_type = other DNA
gcgacacacgtctcgctccattgtggttctaattgctattcggaatatttccatcac

SEQ ID NO: 6830 - DNA, 33 bp, synthetic construct
  misc_feature 1..33: note = Synthetic construct
  source 1..33: mol_type = other DNA
atttcggctgctacggatgagctctttgagtac

SEQ ID NO: 6831 - DNA, 54 bp, synthetic construct
  misc_feature 1..54: note = Synthetic construct
  source 1..54: mol_type = other DNA
tcaaagaatcagtttgatagtagtggttattacttaggaggggcttttgatatc

SEQ ID NO: 6832 - DNA, 54 bp, synthetic construct
  misc_feature 1..54: note = Synthetic construct
  source 1..54: mol_type = other DNA
gcgaaaaccacgacgttttattatgataatagtgacctttttgcttttgatatc

SEQ ID NO: 6833 - DNA, 45 bp, synthetic construct
  misc_feature 1..45: note = Synthetic construct
  source 1..45: mol_type = other DNA
gcgagagaggcaggtggctggtcctctcacaactggttcgacccc

SEQ ID NO: 6834 - DNA, 33 bp, synthetic construct
  misc_feature 1..33: note = Synthetic construct
  source 1..33: mol_type = other DNA
gcgagagaagggcattccgaaggttttgatatt

SEQ ID NO: 6835 - DNA, 63 bp, synthetic construct
  misc_feature 1..63: note = Synthetic construct
  source 1..63: mol_type = other DNA
accacaggactaggaagcgatgataatagtgattattttatgaacattgatggttttaatatc

SEQ ID NO: 6836 - DNA, 51 bp, synthetic construct
  misc_feature 1..51: note = Synthetic construct
  source 1..51: mol_type = other DNA
gcgagagtttttaggactggagactattggaggggacttctgtgggactac

SEQ ID NO: 6837 - DNA, 81 bp, synthetic construct
  misc_feature 1..81: note = Synthetic construct
  source 1..81: mol_type = other DNA
gcggctcatctgaggggggcgacagatggcggtttttggagtggccttgcgcgtttgaagtcctgggggtggctcgacccc

SEQ ID NO: 6838 - DNA, 51 bp, synthetic construct
  misc_feature 1..51: note = Synthetic construct
  source 1..51: mol_type = other DNA
accacagattttcggttcgatgacagtggttactacaactacttagataac

SEQ ID NO: 6839 - DNA, 51 bp, synthetic construct
  misc_feature 1..51: note = Synthetic construct
  source 1..51: mol_type = other DNA
gcgaaagagggtggacgtggatatagttccttcgataattactttgactat

SEQ ID NO: 6840 - DNA, 30 bp, synthetic construct
  misc_feature 1..30: note = Synthetic construct
  source 1..30: mol_type = other DNA
gcgagaaatagtgcccagccctttgactcc

SEQ ID NO: 6841 - DNA, 63 bp, synthetic construct
  misc_feature 1..63: note = Synthetic construct
  source 1..63: mol_type = other DNA
gcgagagatatcgcccctcattactatgatagtagtgcttattcacccgatgcttttgatatc

SEQ ID NO: 6842 - DNA, 42 bp, synthetic construct
  misc_feature 1..42: note = Synthetic construct
  source 1..42: mol_type = other DNA
gcgaaacggcaggggtatagtagctcgtccccgttggggtcc

SEQ ID NO: 6843 - DNA, 42 bp, synthetic construct
  misc_feature 1..42: note = Synthetic construct
  source 1..42: mol_type = other DNA
gcgaaacgacaggggtatagtagctcgtccccgttggggtcc

SEQ ID NO: 6844 - DNA, 51 bp, synthetic construct
  misc_feature 1..51: note = Synthetic construct
  source 1..51: mol_type = other DNA
gcgagagtcggctgtagtggtgatcattgctatggatattactttgactac

SEQ ID NO: 6845 - DNA, 33 bp, synthetic construct
  misc_feature 1..33: note = Synthetic construct
  source 1..33: mol_type = other DNA
gcaaccctctctgcccctgttatctcccgtcac

SEQ ID NO: 6846 - DNA, 45 bp, synthetic construct
  misc_feature 1..45: note = Synthetic construct
  source 1..45: mol_type = other DNA
gcgagagggcgcagtgactggttgactggaggaggttttgatatt

SEQ ID NO: 6847 - DNA, 36 bp, synthetic construct
  misc_feature 1..36: note = Synthetic construct
  source 1..36: mol_type = other DNA
gcaagagaggactacggtggtaaaccccaggcctac

SEQ ID NO: 6848 - DNA, 33 bp, synthetic construct
  misc_feature 1..33: note = Synthetic construct
  source 1..33: mol_type = other DNA
gcgagaggtttgtccgcagtggctggttcgggg

SEQ ID NO: 6849 - DNA, 48 bp, synthetic construct
  misc_feature 1..48: note = Synthetic construct
  source 1..48: mol_type = other DNA
gcgcgagttcagcatgatagtagtggttattattctggccttgacttc

SEQ ID NO: 6850 - DNA, 54 bp, synthetic construct
  misc_feature 1..54: note = Synthetic construct
  source 1..54: mol_type = other DNA
gcgaggcgatacaccggtgcctggtcctacttcacgtaccactacttggacgtc

SEQ ID NO: 6851 - DNA, 51 bp, synthetic construct
  misc_feature 1..51: note = Synthetic construct
  source 1..51: mol_type = other DNA
gcgaaaccgcgggtgaactttggttcggggagaggagacgattttgatatc

SEQ ID NO: 6852 - DNA, 45 bp, synthetic construct
  misc_feature 1..45: note = Synthetic construct
  source 1..45: mol_type = other DNA
gcgagaaattttggagtgattcttataggagatgcctttgatctc

SEQ ID NO: 6853 - DNA, 57 bp, synthetic construct
  misc_feature 1..57: note = Synthetic construct
  source 1..57: mol_type = other DNA
gtcagaggcgattcagttcacttcgataggaatgcatattatgggggatttgatgtc

SEQ ID NO: 6854 - DNA, 48 bp, synthetic construct
  misc_feature 1..48: note = Synthetic construct
  source 1..48: mol_type = other DNA
gcgagagatccccctagtgagtgggaggtaacgttctactttgactac

SEQ ID NO: 6855 - DNA, 54 bp, synthetic construct
  misc_feature 1..54: note = Synthetic construct
  source 1..54: mol_type = other DNA
gcgagagacggtgcgtccatttttatcgaagtaattaatttctacatggacgtc

SEQ ID NO: 6856 - DNA, 45 bp, synthetic construct
  misc_feature 1..45: note = Synthetic construct
  source 1..45: mol_type = other DNA
gcgcgccggttttgtagtggtggtagctgctactctcttgaatat

SEQ ID NO: 6857 - DNA, 45 bp, synthetic construct
  misc_feature 1..45: note = Synthetic construct
  source 1..45: mol_type = other DNA
gtgaaggattcgggttcggggaggatcatttccctgcttgacttc

SEQ ID NO: 6858 - DNA, 42 bp, synthetic construct
  misc_feature 1..42: note = Synthetic construct
  source 1..42: mol_type = other DNA
gcgagaggtcccggatacagctatgacatccagtttgactac

SEQ ID NO: 6859 - DNA, 42 bp, synthetic construct
  misc_feature 1..42: note = Synthetic construct
  source 1..42: mol_type = other DNA
gcgagaagtcacggagatggctacaattcttactttgactac

SEQ ID NO: 6860 - DNA, 39 bp, synthetic construct
  misc_feature 1..39: note = Synthetic construct
  source 1..39: mol_type = other DNA
gcgaaagactattatggttcggggagttattgcgactac

SEQ ID NO: 6861 - DNA, 66 bp, synthetic construct
  misc_feature 1..66: note = Synthetic construct
  source 1..66: mol_type = other DNA
gcgagagccaacacctattactttacctcggggacttattataacaatgacgactaccttgactcc

SEQ ID NO: 6862 - DNA, 42 bp, synthetic construct
  misc_feature 1..42: note = Synthetic construct
  source 1..42: mol_type = other DNA
ggaagagattttgggagatggccgcccaggggacttgactac

SEQ ID NO: 6863 - DNA, 39 bp, synthetic construct
  misc_feature 1..39: note = Synthetic construct
  source 1..39: mol_type = other DNA
gcgaaagacatgtttgatattagtggtctcaatgactac

SEQ ID NO: 6864 - DNA, 42 bp, synthetic construct
  misc_feature 1..42: note = Synthetic construct
  source 1..42: mol_type = other DNA
gcgaaagatcgggatgactacggtgactactactttgactac

SEQ ID NO: 6865 - DNA, 45 bp, synthetic construct
  misc_feature 1..45: note = Synthetic construct
  source 1..45: mol_type = other DNA
gcgagagcccaaacccattactatgatagtagagggtttggcgac

SEQ ID NO: 6866 - DNA, 42 bp, synthetic construct
  misc_feature 1..42: note = Synthetic construct
  source 1..42: mol_type = other DNA
gcgagagatcggtttgtagaggctacgaccacggcggacttc

SEQ ID NO: 6867 - DNA, 60 bp, synthetic construct
  misc_feature 1..60: note = Synthetic construct
  source 1..60: mol_type = other DNA
gcgagagtggagaggacaccctcatccggggcactctactactactactacatggacgtc

SEQ ID NO: 6868 - DNA, 57 bp, synthetic construct
  misc_feature 1..57: note = Synthetic construct
  source 1..57: mol_type = other DNA
gcgaaagagggtggatatagtggctacggttactactactactactacatggacgtc

SEQ ID NO: 6869 - DNA, 42 bp, synthetic construct
  misc_feature 1..42: note = Synthetic construct
  source 1..42: mol_type = other DNA
gcgaaagatccgaactcgggcagcagtggccaccttgactac

SEQ ID NO: 6870 - DNA, 45 bp, synthetic construct
  misc_feature 1..45: note = Synthetic construct
  source 1..45: mol_type = other DNA
gcgaaagatgtggttcggggagttgactactactacatggacgtc

SEQ ID NO: 6871 - DNA, 60 bp, synthetic construct
  misc_feature 1..60: note = Synthetic construct
  source 1..60: mol_type = other DNA
gcgagagatcggagtagttactatgatagtagtggttattacctaaactggttcgacccc

SEQ ID NO: 6872 - DNA, 54 bp, synthetic construct
  misc_feature 1..54: note = Synthetic construct
  source 1..54: mol_type = other DNA
gcgagagattactgtagtagtaccagctgccctttctactactacatggacgtc

SEQ ID NO: 6873 - DNA, 60 bp, synthetic construct
  misc_feature 1..60: note = Synthetic construct
  source 1..60: mol_type = other DNA
gcgagagctcacggcgaaggatattgtactaatggtgtatgttcctcctactttgactac

SEQ ID NO: 6874 - DNA, 33 bp, synthetic construct
  misc_feature 1..33: note = Synthetic construct
  source 1..33: mol_type = other DNA
gcgaaagacgccaatggtggctggtatgactac

SEQ ID NO: 6875 - DNA, 36 bp, synthetic construct
  misc_feature 1..36: note = Synthetic construct
  source 1..36: mol_type = other DNA
gcgttctttccctcgggcagttatgcctttcacatt

SEQ ID NO: 6876 - DNA, 57 bp, synthetic construct
  misc_feature 1..57: note = Synthetic construct
  source 1..57: mol_type = other DNA
gcaagggatcagtattactctgaaactactgcttattacttcaaatacttccaacac

SEQ ID NO: 6877 - DNA, 57 bp, synthetic construct
  misc_feature 1..57: note = Synthetic construct
  source 1..57: mol_type = other DNA
gcgaaagtcggttatggtatcagttggtacttgggctactactactacatggacgac

SEQ ID NO: 6878 - DNA, 57 bp, synthetic construct
  misc_feature 1..57: note = Synthetic construct
  source 1..57: mol_type = other DNA
gcgagagctttcgggaatttttttgattggtcctcccgggactattacatggacgtc

SEQ ID NO: 6879 - DNA, 39 bp, synthetic construct
  misc_feature 1..39: note = Synthetic construct
  source 1..39: mol_type = other DNA
gcgcgagggggggcctacgaaatgacctggtttgacacc

SEQ ID NO: 6880 - DNA, 54 bp, synthetic construct
  misc_feature 1..54: note = Synthetic construct
  source 1..54: mol_type = other DNA
gcgcgagatcatatggtgtctgcttcctcctacaactccttctacatggacgtc

SEQ ID NO: 6881 - DNA, 42 bp, synthetic construct
  misc_feature 1..42: note = Synthetic construct
  source 1..42: mol_type = other DNA
gcgagcatgaccatggttcggacgaataactggttcgacctc

SEQ ID NO: 6882 - DNA, 48 bp, synthetic construct
  misc_feature 1..48: note = Synthetic construct
  source 1..48: mol_type = other DNA
gcgacagataggcattcctatcattcggggagttttgttcttgacttc

SEQ ID NO: 6883 - DNA, 42 bp, synthetic construct
  misc_feature 1..42: note = Synthetic construct
  source 1..42: mol_type = other DNA
gcgaaaaagtttggccgcggactgtctgatgtttttgatatg

SEQ ID NO: 6884 - DNA, 27 bp, synthetic construct
  misc_feature 1..27: note = Synthetic construct
  source 1..27: mol_type = other DNA
gcgctatattggaattatgtcctcgag

SEQ ID NO: 6885 - DNA, 45 bp, synthetic construct
  misc_feature 1..45: note = Synthetic construct
  source 1..45: mol_type = other DNA
actagacatctggatttcaatagtgacccgtcggggggggactac

SEQ ID NO: 6886 - DNA, 45 bp, synthetic construct
  misc_feature 1..45: note = Synthetic construct
  source 1..45: mol_type = other DNA
gcaaaatccccctcccctgaggtgggaactacaccctttgactac

SEQ ID NO: 6887 - DNA, 45 bp, synthetic construct
  misc_feature 1..45: note = Synthetic construct
  source 1..45: mol_type = other DNA
gcaaaggacctagcagcagctggcacttatgatgcttttgaaaaa

SEQ ID NO: 6888 - DNA, 42 bp, synthetic construct
  misc_feature 1..42: note = Synthetic construct
  source 1..42: mol_type = other DNA
gtaaaagatctcgcgagcggtatggttcagggttttgatatc

SEQ ID NO: 6889 - DNA, 54 bp, synthetic construct
  misc_feature 1..54: note = Synthetic construct
  source 1..54: mol_type = other DNA
gcaaaagattcccacccttcttatggttcggggagttgggatgcttttgatatc

SEQ ID NO: 6890 - DNA, 51 bp, synthetic construct
  misc_feature 1..51: note = Synthetic construct
  source 1..51: mol_type = other DNA
gcaagagatataaacccctatagcagtggctgggtgtcctactttgactac

SEQ ID NO: 6891 - DNA, 57 bp, synthetic construct
  misc_feature 1..57: note = Synthetic construct
  source 1..57: mol_type = other DNA
gcaaaggataggggattacgtttgggggagttatcgcggggtcactactttgacttg

SEQ ID NO: 6892 - DNA, 39 bp, synthetic construct
  misc_feature 1..39: note = Synthetic construct
  source 1..39: mol_type = other DNA
gcaaaagacagtagtggatataatgatgcttttgagatc

SEQ ID NO: 6893 - DNA, 39 bp, synthetic construct
  misc_feature 1..39: note = Synthetic construct
  source 1..39: mol_type = other DNA
gtgaaagataaaacccgtggccatcagtacttccaacac

SEQ ID NO: 6894 - DNA, 36 bp, synthetic construct
  misc_feature 1..36: note = Synthetic construct
  source 1..36: mol_type = other DNA
gcaaaagatgagggatttttgactggtttttctcat

SEQ ID NO: 6895 - DNA, 42 bp, synthetic construct
  misc_feature 1..42: note = Synthetic construct
  source 1..42: mol_type = other DNA
gcaacaccctcgcgtagggggtggttattatgggttgactac

SEQ ID NO: 6896 - DNA, 36 bp, synthetic construct
  misc_feature 1..36: note = Synthetic construct
  source 1..36: mol_type = other DNA
gcaacagaaggatatagtggctacgactttgactac

SEQ ID NO: 6897 - DNA, 24 bp, synthetic construct
  misc_feature 1..24: note = Synthetic construct
  source 1..24: mol_type = other DNA
gcaacagatacccctattcgggag

SEQ ID NO: 6898 - DNA, 39 bp, synthetic construct
  misc_feature 1..39: note = Synthetic construct
  source 1..39: mol_type = other DNA
gcaacagatcagggtagtggttattactactttgactac

SEQ ID NO: 6899 - DNA, 36 bp, synthetic construct
  misc_feature 1..36: note = Synthetic construct
  source 1..36: mol_type = other DNA
gcaacagccaacattggggctattactatagcctac

SEQ ID NO: 6900 - DNA, 33 bp, synthetic construct
  misc_feature 1..33: note = Synthetic construct
  source 1..33: mol_type = other DNA
gcaacagccgctagtagtggttattttttctac

SEQ ID NO: 6901 - DNA, 60 bp, synthetic construct
  misc_feature 1..60: note = Synthetic construct
  source 1..60: mol_type = other DNA
gcaacagcgggtggttacgatattttgactggttattatagccccggtgcttttgatatc

SEQ ID NO: 6902 - DNA, 48 bp, synthetic construct
  misc_feature 1..48: note = Synthetic construct
  source 1..48: mol_type = other DNA
gcaactgtaactactgggaggggctactactactactacatggacgtc

SEQ ID NO: 6903 - DNA, 39 bp, synthetic construct
  misc_feature 1..39: note = Synthetic construct
  source 1..39: mol_type = other DNA
gcaaggaggcattacgatattttgacttcggtcgacccc

SEQ ID NO: 6904 - DNA, 36 bp, synthetic construct
  misc_feature 1..36: note = Synthetic construct
  source 1..36: mol_type = other DNA
gcaatggttatggctacaatgaggagggttgactac

SEQ ID NO: 6905 - DNA, 36 bp, synthetic construct
  misc_feature 1..36: note = Synthetic construct
  source 1..36: mol_type = other DNA
gcgacgcacttcgacggctacaatctacccgactac

SEQ ID NO: 6906 - DNA, 33 bp, synthetic construct
  misc_feature 1..33: note = Synthetic construct
  source 1..33: mol_type = other DNA
gtgaccctctctgcccctgttacctcacgccag

SEQ ID NO: 6907 - DNA, 54 bp, synthetic construct
  misc_feature 1..54: note = Synthetic construct
  source 1..54: mol_type = other DNA
gcgagagcctcaggtggatatagtggctacgaccaatggtactactttgactac

SEQ ID NO: 6908 - DNA, 36 bp, synthetic construct
  misc_feature 1..36: note = Synthetic construct
  source 1..36: mol_type = other DNA
ctgttactggaaggtttgacagcaacttctactgac

SEQ ID NO: 6909 - DNA, 48 bp, synthetic construct
  misc_feature 1..48: note = Synthetic construct
  source 1..48: mol_type = other DNA
gcgagatgcgaaattttgaccggttattatagttgccacttcgactcc

SEQ ID NO: 6910 - DNA, 51 bp, synthetic construct
  misc_feature 1..51: note = Synthetic construct
  source 1..51: mol_type = other DNA
gcgagattgaatggtgactacgaagaggggaactactactacatggacgtc

SEQ ID NO: 6911 - DNA, 36 bp, synthetic construct
  misc_feature 1..36: note = Synthetic construct
  source 1..36: mol_type = other DNA
gcgagtggggttgatacagcctatgcttttgatatc

SEQ ID NO: 6912 - DNA, 54 bp, synthetic construct
  misc_feature 1..54: note = Synthetic construct
  source 1..54: mol_type = other DNA
gtgagagaaagggcccttcggcctaatatagcagctcgtggaccctttgactac

SEQ ID NO: 6913 - DNA, 48 bp, synthetic construct
  misc_feature 1..48: note = Synthetic construct
  source 1..48: mol_type = other DNA
gcgagagataatcagttgaggagcagcacactatggggctttgactac

SEQ ID NO: 6914 - DNA, 36 bp, synthetic construct
  misc_feature 1..36: note = Synthetic construct
  source 1..36: mol_type = other DNA
gcggcggtcagggggagcttctttcaccttcaccac

SEQ ID NO: 6915 - DNA, 51 bp, synthetic construct
  misc_feature 1..51: note = Synthetic construct
  source 1..51: mol_type = other DNA
gtgagagatctctggtcgatctacggtgacttcatcaagggatttgtcgac

SEQ ID NO: 6916 - DNA, 30 bp, synthetic construct
  misc_feature 1..30: note = Synthetic construct
  source 1..30: mol_type = other DNA
gcgagagcatacaattattcttgtggattc

SEQ ID NO: 6917 - DNA, 48 bp, synthetic construct
  misc_feature 1..48: note = Synthetic construct
  source 1..48: mol_type = other DNA
gtgataggccgagcagcaggtggaaggggcactgacgcttttgcgatc

SEQ ID NO: 6918 - DNA, 45 bp, synthetic construct
  misc_feature 1..45: note = Synthetic construct
  source 1..45: mol_type = other DNA
gcaacagatctactatggttcggggagcgtgatgcttttgatatc

SEQ ID NO: 6919 - DNA, 30 bp, synthetic construct
  misc_feature 1..30: note = Synthetic construct
  source 1..30: mol_type = other DNA
gcaacttgggagcagggctggtcggtctac

SEQ ID NO: 6920 - DNA, 57 bp, synthetic construct
  misc_feature 1..57: note = Synthetic construct
  source 1..57: mol_type = other DNA
acgagagttcgacttcgtatagatgcaataggggcccgcagcaactggttcgacccc

SEQ ID NO: 6921 - DNA, 39 bp, synthetic construct
  misc_feature 1..39: note = Synthetic construct
  source 1..39: mol_type = other DNA
gcggcagtctcccaccagtctggtggtgcttttgatatc

SEQ ID NO: 6922 - DNA, 36 bp, synthetic construct
  misc_feature 1..36: note = Synthetic construct
  source 1..36: mol_type = other DNA
gcgagagaccatgggagcgactggtacttcgatctc

SEQ ID NO: 6923 - DNA, 42 bp, synthetic construct
  misc_feature 1..42: note = Synthetic construct
  source 1..42: mol_type = other DNA
gcgagagaaataactgagttttactatggttcgggggactac

SEQ ID NO: 6924 - DNA, 54 bp, synthetic construct
  misc_feature 1..54: note = Synthetic construct
  source 1..54: mol_type = other DNA
gcgagagatcggctctgtagtggtggtagctgctactccgggtggttcgacccc

SEQ ID NO: 6925 - DNA, 48 bp, synthetic construct
  misc_feature 1..48: note = Synthetic construct
  source 1..48: mol_type = other DNA
gcgagagatccaaccccttactatgaggggggttggtacttcgatctc

SEQ ID NO: 6926 - DNA, 42 bp, synthetic construct
  misc_feature 1..42: note = Synthetic construct
  source 1..42: mol_type = other DNA
gcgagaaacctagattactatggtttgggggagttcgacccc

SEQ ID NO: 6927 - DNA, 36 bp, synthetic construct
  misc_feature 1..36: note = Synthetic construct
  source 1..36: mol_type = other DNA
gcaacactggcggttcgaagagtcccacgcccgtac

SEQ ID NO: 6928 - DNA, 36 bp, synthetic construct
  misc_feature 1..36: note = Synthetic construct
  source 1..36: mol_type = other DNA
gtgcgagcgcaccgggggagcccctactttgactcc

SEQ ID NO: 6929 - DNA, 45 bp, synthetic construct
  misc_feature 1..45: note = Synthetic construct
  source 1..45: mol_type = other DNA
gctagagcctctgggggatctacagtccaccgctactatgactac

SEQ ID NO: 6930 - DNA, 45 bp, synthetic construct
  misc_feature 1..45: note = Synthetic construct
  source 1..45: mol_type = other DNA
gttaaagatggagacagcaacaccgcatacttccactttgacact

SEQ ID NO: 6931 - DNA, 57 bp, synthetic construct
  misc_feature 1..57: note = Synthetic construct
  source 1..57: mol_type = other DNA
actagagcctcttactgtattaatggaagatgcacgtcacctggcccctttgacttc

SEQ ID NO: 6932 - DNA, 51 bp, synthetic construct
  misc_feature 1..51: note = Synthetic construct
  source 1..51: mol_type = other DNA
gccagagggggcttccatgacgaataccgggccctttcgccctttgacttc

SEQ ID NO: 6933 - DNA, 60 bp, synthetic construct
  misc_feature 1..60: note = Synthetic construct
  source 1..60: mol_type = other DNA
gcgagagaccgccttcatgacccatccgcggtgcgcttttttgactggtcgtttgacaag

SEQ ID NO: 6934 - DNA, 51 bp, synthetic construct
  misc_feature 1..51: note = Synthetic construct
  source 1..51: mol_type = other DNA
gcgagaatgtcttattacgatggaagtggttactacttcttctttgaccac

SEQ ID NO: 6935 - DNA, 48 bp, synthetic construct
  misc_feature 1..48: note = Synthetic construct
  source 1..48: mol_type = other DNA
gcgacagcgggggcccacagtaatggtttctattacggctttgagtcc

SEQ ID NO: 6936 - DNA, 48 bp, synthetic construct
  misc_feature 1..48: note = Synthetic construct
  source 1..48: mol_type = other DNA
gcgaggttccccataacacctactgctaactattactacatggacgtc

SEQ ID NO: 6937 - DNA, 36 bp, synthetic construct
  misc_feature 1..36: note = Synthetic construct
  source 1..36: mol_type = other DNA
gtgaaatatggtgcacaggaatggttaggggagtct

SEQ ID NO: 6938 - DNA, 54 bp, synthetic construct
  misc_feature 1..54: note = Synthetic construct
  source 1..54: mol_type = other DNA
gcgagagggttcgacgcttatgattttttgcctggctctccctactttgactac

SEQ ID NO: 6939 - DNA, 48 bp, synthetic construct
  misc_feature 1..48: note = Synthetic construct
  source 1..48: mol_type = other DNA
gcgagactagtggagaggttctccccccacactttctactttcactac

SEQ ID NO: 6940 - DNA, 63 bp, synthetic construct
  misc_feature 1..63: note = Synthetic construct
  source 1..63: mol_type = other DNA
gcaagagatcgatctccccttattaagatttttggagtgcttatgggctcctacatggacgtc

SEQ ID NO: 6941 - DNA, 36 bp, synthetic construct; identical to SEQ ID NO: 1812
  misc_feature 1..36: note = Synthetic construct
  source 1..36: mol_type = other DNA

SEQ ID NO: 6942 - DNA, 27 bp, synthetic construct
  misc_feature 1..27: note = Synthetic construct
  source 1..27: mol_type = other DNA
gcgagagtcctatttggggggcccctg

SEQ ID NO: 6943 - DNA, 45 bp, synthetic construct
  misc_feature 1..45: note = Synthetic construct
  source 1..45: mol_type = other DNA
gcgcgcggtctcagtcccaactggtacttcgatgcttttgacata

SEQ ID NO: 6944 - DNA, 30 bp, synthetic construct
  misc_feature 1..30: note = Synthetic construct
  source 1..30: mol_type = other DNA
gcgaaagaatttagaggagcttttgatatc

SEQ ID NO: 6945 - DNA, 48 bp, synthetic construct
  misc_feature 1..48: note = Synthetic construct
  source 1..48: mol_type = other DNA
gcgaggagacacagtggcgacgattcgcccagctacttctttgactac

SEQ ID NO: 6946 - DNA, 45 bp, synthetic construct
  misc_feature 1..45: note = Synthetic construct
  source 1..45: mol_type = other DNA
acgagaggccgatacccccgcatgcttcgcaggcactttgacttc

SEQ ID NO: 6947 - DNA, 48 bp, synthetic construct
  misc_feature 1..48: note = Synthetic construct
  source 1..48: mol_type = other DNA
gcgacccgaagacggatgttttcgaccaatgtcgattcttatgatatc

SEQ ID NO: 6948 - DNA, 45 bp, synthetic construct
  misc_feature 1..45: note = Synthetic construct
  source 1..45: mol_type = other DNA
gcggcagtccctgggggcctcttaattcgcgaaacgttcgagtcg

SEQ ID NO: 6949 - DNA, 39 bp, synthetic construct
  misc_feature 1..39: note = Synthetic construct
  source 1..39: mol_type = other DNA
acaacagcccggggccgctggacctaccactttgcgtcc

SEQ ID NO: 6950 - DNA, 51 bp, synthetic construct
  misc_feature 1..51: note = Synthetic construct
  source 1..51: mol_type = other DNA
gcaagagcggcgatttttggagtggttttttgggaaaactatttcgacccc

SEQ ID NO: 6951 - DNA, 27 bp, synthetic construct
  misc_feature 1..27: note = Synthetic construct
  source 1..27: mol_type = other DNA
gcgagatatgagtatgatcttgactac

SEQ ID NO: 6952 - DNA, 63 bp, synthetic construct
  misc_feature 1..63: note = Synthetic construct
  source 1..63: mol_type = other DNA
gcaacagagggggtcggaaggactaataaagcaggtgttggttgggatgatgcttttgatatc

SEQ ID NO: 6953 - DNA, 60 bp, synthetic construct
  misc_feature 1..60: note = Synthetic construct
  source 1..60: mol_type = other DNA
gcgaaatctaaaacccatactttttatcctggttcgggaggtcccacttacatcgacgac

SEQ ID NO: 6954 - DNA, 48 bp, synthetic construct
  misc_feature 1..48: note = Synthetic construct
  source 1..48: mol_type = other DNA
gcgagagtgatggaaacagccatggcccccgactactacatggacgtc

SEQ ID NO: 6955 - DNA, 51 bp, synthetic construct
  misc_feature 1..51: note = Synthetic construct
  source 1..51: mol_type = other DNA
gcgagcgcgaactggactgcggtgatttcaacaaccgataccctccatgtc

SEQ ID NO: 6956 - DNA, 42 bp, synthetic construct
  misc_feature 1..42: note = Synthetic construct
  source 1..42: mol_type = other DNA
gcgaaggtgctgctgggagctcttaccgatgctttcgatatc

SEQ ID NO: 6957 - DNA, 48 bp, synthetic construct; identical to SEQ ID NO: 1815
  misc_feature 1..48: note = Synthetic construct
  source 1..48: mol_type = other DNA

SEQ ID NO: 6958 - DNA, 66 bp, synthetic construct
  misc_feature 1..66: note = Synthetic construct
  source 1..66: mol_type = other DNA
gcaacctcccctaagtttgatgataacgcctgggggacttttcgtgatacggccacacctgactac

SEQ ID NO: 6959 - DNA, 48 bp, synthetic construct
  misc_feature 1..48: note = Synthetic construct
  source 1..48: mol_type = other DNA
gccagaggcgataggtcgataatagtaggtcaattttacatggacgtc

SEQ ID NO: 6960 - DNA, 45 bp, synthetic construct
  misc_feature 1..45: note = Synthetic construct
  source 1..45: mol_type = other DNA
gcgcgatgtaaggccgaatatacgactggttgccccggggactat

SEQ ID NO: 6961 - DNA, 39 bp, synthetic construct
  misc_feature 1..39: note = Synthetic construct
  source 1..39: mol_type = other DNA
gcgcgacggttttattcttatggttttgcctttgatatc

SEQ ID NO: 6962 - DNA, 57 bp, synthetic construct
  misc_feature 1..57: note = Synthetic construct
  source 1..57: mol_type = other DNA
gcgagaggttggggtatatcgattggtggagcgacaaccaccaagtggctccacccc

SEQ ID NO: 6963 - DNA, 60 bp, synthetic construct
  misc_feature 1..60: note = Synthetic construct
  source 1..60: mol_type = other DNA
gcgagagagggggcaggctattactatgatagcagtggcctgggatatggctttgatatc

SEQ ID NO: 6964 - DNA, 36 bp, synthetic construct
  misc_feature 1..36: note = Synthetic construct
  source 1..36: mol_type = other DNA
gcgagagctgatagcaccgactggcaaatggactac

SEQ ID NO: 6965 - DNA, 33 bp, synthetic construct
  misc_feature 1..33: note = Synthetic construct
  source 1..33: mol_type = other DNA
gcgagacgatatggcttcactcccctcgacttc

SEQ ID NO: 6966 - DNA, 57 bp, synthetic construct
  misc_feature 1..57: note = Synthetic construct
  source 1..57: mol_type = other DNA
gcgagagataatcggccttattatgatatgagtgggtattcacctgaccttgactac

SEQ ID NO: 6967 - DNA, 45 bp, synthetic construct
  misc_feature 1..45: note = Synthetic construct
  source 1..45: mol_type = other DNA
gcgagagagacgtggggattccttggagggggctactttgactat

SEQ ID NO: 6968 - DNA, 42 bp, synthetic construct
  misc_feature 1..42: note = Synthetic construct
  source 1..42: mol_type = other DNA
gcgaaatatcgcccaggacctaagaatgatgctttgcatgtc

SEQ ID NO: 6969 - DNA, 36 bp, synthetic construct
  misc_feature 1..36: note = Synthetic construct
  source 1..36: mol_type = other DNA
gcgcgaatttattatagtgggacgtaccaagactac

SEQ ID NO: 6970 - DNA, 60 bp, synthetic construct
  misc_feature 1..60: note = Synthetic construct
  source 1..60: mol_type = other DNA
actcgagataaaggaatgtatgactggaactccgggacctacctctactacatggacgcc

SEQ ID NO: 6971 - DNA, 51 bp, synthetic construct; identical to SEQ ID NO: 1811
  misc_feature 1..51: note = Synthetic construct
  source 1..51: mol_type = other DNA

SEQ ID NO: 6972 - DNA, 30 bp, synthetic construct
  misc_feature 1..30: note = Synthetic construct
  source 1..30: mol_type = other DNA
accgtccacattggcaccagcgctaacttc

SEQ ID NO: 6973 - DNA, 60 bp, synthetic construct
  misc_feature 1..60: note = Synthetic construct
  source 1..60: mol_type = other DNA
actagagatcgaggaacgtatgactggaactacgggacctacttctactacatggaagtc

SEQ ID NO: 6974 - DNA, 48 bp, synthetic construct
  misc_feature 1..48: note = Synthetic construct
  source 1..48: mol_type = other DNA
gcgagagggggacgcacctttggttatacgtgggagttctttgacaac

SEQ ID NO: 6975 - DNA, 48 bp, synthetic construct
  misc_feature 1..48: note = Synthetic construct
  source 1..48: mol_type = other DNA
gcgagagagagaagtccgagagtcgactactaccactacatggacgtc

SEQ ID NO: 6976 - DNA, 36 bp, synthetic construct
  misc_feature 1..36: note = Synthetic construct
  source 1..36: mol_type = other DNA
gcacacagtccaacatattccaacatctttgacttc

SEQ ID NO: 6977 - DNA, 48 bp, synthetic construct
  misc_feature 1..48: note = Synthetic construct
  source 1..48: mol_type = other DNA
gtaagagcatattgtagtagtagcagctgcccaggcggttttgacttc

SEQ ID NO: 6978 - DNA, 36 bp, synthetic construct
  misc_feature 1..36: note = Synthetic construct
  source 1..36: mol_type = other DNA
gcgaagggccgtgcaaattggcgatactttgacctc

SEQ ID NO: 6979 - DNA, 45 bp, synthetic construct
  misc_feature 1..45: note = Synthetic construct
  source 1..45: mol_type = other DNA
gcgagaattagagtcggggaattatttttcggcacctttgacttc

SEQ ID NO: 6980 - DNA, 57 bp, synthetic construct
  misc_feature 1..57: note = Synthetic construct
  source 1..57: mol_type = other DNA
gcgagaggacgttttcagagagtgggaggcgtctacacctacttctacatggacgtc

SEQ ID NO: 6981 - DNA, 45 bp, synthetic construct
  misc_feature 1..45: note = Synthetic construct
  source 1..45: mol_type = other DNA
gtgaactccttcaaatacaggagcaacccgggggacttcggctcc

SEQ ID NO: 6982 - DNA, 57 bp, synthetic construct
  misc_feature 1..57: note = Synthetic construct
  source 1..57: mol_type = other DNA
gcgagaggttggggtattacgatttctggagcgtctaccagcaagtggctccacccc

SEQ ID NO: 6983 - DNA, 72 bp, synthetic construct
  misc_feature 1..72: note = Synthetic construct
  source 1..72: mol_type = other DNA
gcgagatttggctctccaactctccttattgactacggtgactacgaaaaggtgatcggtgctttggatgtc

SEQ ID NO: 6984 - DNA, 63 bp, synthetic construct
  misc_feature 1..63: note = Synthetic construct
  source 1..63: mol_type = other DNA
gcgagaggtcacagaatatattatgatattagaagttattacggagagtcctggctcgacccc

SEQ ID NO: 6985 - DNA, 36 bp, synthetic construct
  misc_feature 1..36: note = Synthetic construct
  source 1..36: mol_type = other DNA
gcacggatgctggcccgacagaattacttcgacccc

SEQ ID NO: 6986 - DNA, 48 bp, synthetic construct
  misc_feature 1..48: note = Synthetic construct
  source 1..48: mol_type = other DNA
gcacggattctggaccctcattactatggttcgggggctattgactac

SEQ ID NO: 6987 - DNA, 51 bp, synthetic construct
  misc_feature 1..51: note = Synthetic construct
  source 1..51: mol_type = other DNA
tcgacagatgcttccaatgattacacctgggggagttatcgcctagaccac

SEQ ID NO: 6988 - DNA, 57 bp, synthetic construct
  misc_feature 1..57: note = Synthetic construct
  source 1..57: mol_type = other DNA
gcgagagatggtctttattgtagtaggagtggctgtttcgcggactggctcgacctc

SEQ ID NO: 6989 - DNA, 36 bp, synthetic construct
  misc_feature 1..36: note = Synthetic construct
  source 1..36: mol_type = other DNA
gtgagactgactgcggtgactcactactttgactac

SEQ ID NO: 6990 - DNA, 45 bp, synthetic construct
  misc_feature 1..45: note = Synthetic construct
  source 1..45: mol_type = other DNA
gcgaggccccggaggagtggctacaattatgttggttttgatgtc

SEQ ID NO: 6991 - DNA, 42 bp, synthetic construct
  misc_feature 1..42: note = Synthetic construct
  source 1..42: mol_type = other DNA
gcggtggccgcttacccggggagaggtaggcgtctcgacccc

SEQ ID NO: 6992 - DNA, 27 bp, synthetic construct
  misc_feature 1..27: note = Synthetic construct
  source 1..27: mol_type = other DNA
gccagaggagttcgatattacgccccc

SEQ ID NO: 6993 - DNA, 39 bp, synthetic construct
  misc_feature 1..39: note = Synthetic construct
  source 1..39: mol_type = other DNA
actagtccctcggggagttattaccccctcccctactac

SEQ ID NO: 6994 - DNA, 69 bp, synthetic construct
  misc_feature 1..69: note = Synthetic construct
  source 1..69: mol_type = other DNA
gtacgggtaaaatattacgatgttgtgactggccatcctacggcctaccattcctactacatggacgtc

SEQ ID NO: 6995 - DNA, 45 bp, synthetic construct
  misc_feature 1..45: note = Synthetic construct
  source 1..45: mol_type = other DNA
gcacgggcggcgtgtagtggttattactactactacatggacgtc

SEQ ID NO: 6996 - DNA, 51 bp, synthetic construct
  misc_feature 1..51: note = Synthetic construct
  source 1..51: mol_type = other DNA
gcacggatcccacccaacacacagctatgggccaattactactttgactac

SEQ ID NO: 6997 - DNA, 42 bp, synthetic construct
  misc_feature 1..42: note = Synthetic construct
  source 1..42: mol_type = other DNA
gcacggtcatttctgcctacatccagttattcttttgacttc

SEQ ID NO: 6998 - DNA, 66 bp, synthetic construct
  misc_feature 1..66: note = Synthetic construct
  source 1..66: mol_type = other DNA
gcacggacactggttactaatgtggcagcagctgggaattactactaccactactacatggacgtc

SEQ ID NO: 6999 - DNA, 45 bp, synthetic construct
  misc_feature 1..45: note = Synthetic construct
  source 1..45: mol_type = other DNA
gcacggataaggtactatggttcggggagttgttactttgactac

SEQ ID NO: 7000 - DNA, 33 bp, synthetic construct
  misc_feature 1..33: note = Synthetic construct
  source 1..33: mol_type = other DNA
acacggcctgagaggaacgggcagatcgactac

SEQ ID NO: 7001 - DNA, 36 bp, synthetic construct
  misc_feature 1..36: note = Synthetic construct
  source 1..36: mol_type = other DNA
gcacggaattcgaggcgggagagctttttcgacccc

SEQ ID NO: 7002 - DNA, 54 bp, synthetic construct
  misc_feature 1..54: note = Synthetic construct
  source 1..54: mol_type = other DNA
gttagagaggccccttcttactatgatgccagtggttatttctactttgactac

SEQ ID NO: 7003 - DNA, 45 bp, synthetic construct
  misc_feature 1..45: note = Synthetic construct
  source 1..45: mol_type = other DNA
gcacgggaggattttgatagtggaggttatcatgcatttgatatc

SEQ ID NO: 7004 - DNA, 45 bp, synthetic construct
  misc_feature 1..45: note = Synthetic construct
  source 1..45: mol_type = other DNA
gcgaaggatcgtgacatggccacactttggggacacttccaacac

SEQ ID NO: 7005 - DNA, 51 bp, synthetic construct
  misc_feature 1..51: note = Synthetic construct
  source 1..51: mol_type = other DNA
gcacggatgcgggtagtcgggtccggttcggggactcgttactttgactac

SEQ ID NO: 7006 - DNA, 33 bp, synthetic construct
  misc_feature 1..33: note = Synthetic construct
  source 1..33: mol_type = other DNA
gcacaatcctacgtttcggggagtatcaaatcc

SEQ ID NO: 7007 - DNA, 57 bp, synthetic construct
  misc_feature 1..57: note = Synthetic construct
  source 1..57: mol_type = other DNA
gcacacagaattgcgagtcgtaatggcttgaacctctatattgatgcttttgatttt

SEQ ID NO: 7008 - DNA, 48 bp, synthetic construct
  misc_feature 1..48: note = Synthetic construct
  source 1..48: mol_type = other DNA
gcacacagtcgctattactatactttgggttcctggtactttgactac

SEQ ID NO: 7009 - DNA, 27 bp, synthetic construct
  misc_feature 1..27: note = Synthetic construct
  source 1..27: mol_type = other DNA
gcacacaatggcctcccctttgactgc

SEQ ID NO: 7010 - DNA, 54 bp, synthetic construct
  misc_feature 1..54: note = Synthetic construct
  source 1..54: mol_type = other DNA
gcacaccgaggacgatattgtagtggtaccggctgtgggtactactttgactac

SEQ ID NO: 7011 - DNA, 45 bp, synthetic construct
  misc_feature 1..45: note = Synthetic construct
  source 1..45: mol_type = other DNA
gcattcagcccgcgaggtgtttattatgaatatttctttgaccac

SEQ ID NO: 7012 - DNA, 36 bp, synthetic construct
  misc_feature 1..36: note = Synthetic construct
  source 1..36: mol_type = other DNA
gtgtacagtatatatgggtcggggatttttgggtac

SEQ ID NO: 7013 - DNA, 57 bp, synthetic construct
  misc_feature 1..57: note = Synthetic construct
  source 1..57: mol_type = other DNA
gcacacaacgccaaccgtctgtatttctatgatagtggtcccacattctttgactac

SEQ ID NO: 7014 - DNA, 54 bp, synthetic construct
  misc_feature 1..54: note = Synthetic construct
  source 1..54: mol_type = other DNA
acaaaattcgcaacatattactatgatactcctggtcatgaacaccttgactcc

SEQ ID NO: 7015 - DNA, 54 bp, synthetic construct
  misc_feature 1..54: note = Synthetic construct
  source 1..54: mol_type = other DNA
gcgaggacccttataattggaagtacttatgaacctgaatattacatggacgtc

SEQ ID NO: 7016 - DNA, 30 bp, synthetic construct
  misc_feature 1..30: note = Synthetic construct
  source 1..30: mol_type = other DNA
gcgctcttccctagtggcaactacgactac

SEQ ID NO: 7017 - DNA, 75 bp, synthetic construct
  misc_feature 1..75: note = Synthetic construct
  source 1..75: mol_type = other DNA
gcaagagatctctgggtagatattatgagtacgtttgggggacgtatcgccatgacggatggggcttttgatatc

SEQ ID NO: 7018 - DNA, 51 bp, synthetic construct
  misc_feature 1..51: note = Synthetic construct
  source 1..51: mol_type = other DNA
gccagcggatattgtagcggtggaagatgctacggggaattcctccagcac

SEQ ID NO: 7019 - DNA, 60 bp, synthetic construct
  misc_feature 1..60: note = Synthetic construct
  source 1..60: mol_type = other DNA
gcgcgagataaaagggaggtattggttttcagagcaggcactggttcgggattcgacccc

SEQ ID NO: 7020 - DNA, 54 bp, synthetic construct
  misc_feature 1..54: note = Synthetic construct
  source 1..54: mol_type = other DNA
tcgagagggaccaaggggggggtcagcccacactcctactactacgtggacgtc

SEQ ID NO: 7021 - DNA, 36 bp, synthetic construct
  misc_feature 1..36: note = Synthetic construct
  source 1..36: mol_type = other DNA
gcgagagccctgtatgacagcaacccgtttgactac

SEQ ID NO: 7022 - DNA, 42 bp, synthetic construct
  misc_feature 1..42: note = Synthetic construct
  source 1..42: mol_type = other DNA
gcgagagcccgccattattatgggtcggggagttttgactcc

SEQ ID NO: 7023 - DNA, 63 bp, synthetic construct
  misc_feature 1..63: note = Synthetic construct
  source 1..63: mol_type = other DNA
gcgagttcgttaattcggccatattgtgatggtggtgcctgctactcgaattgggtcgacccc

SEQ ID NO: 7024 - DNA, 36 bp, synthetic construct
  misc_feature 1..36: note = Synthetic construct
  source 1..36: mol_type = other DNA
gcgaggtcgagagatggctacaactccctttatatc

SEQ ID NO: 7025 - DNA, 54 bp, synthetic construct
  misc_feature 1..54: note = Synthetic construct
  source 1..54: mol_type = other DNA
gcgagagagtcgaacgagcttcggagtgcttatcacccctatcactttgactac

SEQ ID NO: 7026 - DNA, 51 bp, synthetic construct
  misc_feature 1..51: note = Synthetic construct
  source 1..51: mol_type = other DNA
gcgagagattcccacctggttcggggagtcgagtctcccgaatctgactac

SEQ ID NO: 7027 - DNA, 39 bp, synthetic construct
  misc_feature 1..39: note = Synthetic construct
  source 1..39: mol_type = other DNA
gcgagacagatgggagattattactactatatggacgtc

SEQ ID NO: 7028 - DNA, 36 bp, synthetic construct
  misc_feature 1..36: note = Synthetic construct
  source 1..36: mol_type = other DNA
gcgagatcaatctggcaaccggaatactttgactac

SEQ ID NO: 7029 - DNA, 45 bp, synthetic construct
  misc_feature 1..45: note = Synthetic construct
  source 1..45: mol_type = other DNA
gcggggctgagttattatgacaattttggctctcaaaatgactac

SEQ ID NO: 7030 - DNA, 39 bp, synthetic construct
  misc_feature 1..39: note = Synthetic construct
  source 1..39: mol_type = other DNA
tcgacatcaaagtactacgacaccttacacctctcttcc

SEQ ID NO: 7031 - DNA, 57 bp, synthetic construct
  misc_feature 1..57: note = Synthetic construct
  source 1..57: mol_type = other DNA
gcgagagttattactagggcgagtcctggcacagacgggaggtaccgtatggacgtc

SEQ ID NO: 7032 - DNA, 33 bp, synthetic construct
  misc_feature 1..33: note = Synthetic construct
  source 1..33: mol_type = other DNA
gcgagagagggtccggggcggggccttgactac

SEQ ID NO: 7033 - DNA, 36 bp, synthetic construct
  misc_feature 1..36: note = Synthetic construct
  source 1..36: mol_type = other DNA
gcgagagattccctccagtatagggcttttgatatc

SEQ ID NO: 7034 - DNA, 66 bp, synthetic construct
  misc_feature 1..66: note = Synthetic construct
  source 1..66: mol_type = other DNA
gcgagagggaatttagttcaatattttgactggtcccaagactactactactactacatggacgtc

SEQ ID NO: 7035 - DNA, 48 bp, synthetic construct
  misc_feature 1..48: note = Synthetic construct
  source 1..48: mol_type = other DNA
gcgagagacatgtacaggatctacttctactactactacatggacgtc

SEQ ID NO: 7036 - DNA, 51 bp, synthetic construct
  misc_feature 1..51: note = Synthetic construct
  source 1..51: mol_type = other DNA
gcgagaaatgttggcatttgcagtagtggcagctgccccccgtttgactcc

SEQ ID NO: 7037 - DNA, 60 bp, synthetic construct
  misc_feature 1..60: note = Synthetic construct
  source 1..60: mol_type = other DNA
gcgagagaggggacgtattactatgatagtagtggttattactacaactggttcgacccc

SEQ ID NO: 7038 - DNA, 42 bp, synthetic construct
  misc_feature 1..42: note = Synthetic construct
  source 1..42: mol_type = other DNA
gtgagggaacgtactatggatccgggagtcccctttgactac

SEQ ID NO: 7039 - DNA, 45 bp, synthetic construct
  misc_feature 1..45: note = Synthetic construct
  source 1..45: mol_type = other DNA
gcgagagaggtggataaagctctggtcggagagctttttgactcc

SEQ ID NO: 7040 - DNA, 45 bp, synthetic construct
  misc_feature 1..45: note = Synthetic construct
  source 1..45: mol_type = other DNA
gtgggactgtacttttatgacaacagcggcaccgaaaatgactgt

SEQ ID NO: 7041 - DNA, 45 bp, synthetic construct
  misc_feature 1..45: note = Synthetic construct
  source 1..45: mol_type = other DNA
atgcgacgcgtggtggtgattgatactagggattcttttgacatg

SEQ ID NO: 7042 - DNA, 60 bp, synthetic construct
  misc_feature 1..60: note = Synthetic construct
  source 1..60: mol_type = other DNA
gcgagagccgaggcgtattacgataatttgcccggttattatgcaagtgcgtttgatata

SEQ ID NO: 7043 - DNA, 63 bp, synthetic construct
  misc_feature 1..63: note = Synthetic construct
  source 1..63: mol_type = other DNA
gcggcaacgattttggctaattatgatgtcgtttttgggagtgatcgccgctcctttgacttc

SEQ ID NO: 7044 - DNA, 84 bp, synthetic construct
  misc_feature 1..84: note = Synthetic construct
  source 1..84: mol_type = other DNA
gcgcgcgtggcagcctatcacaatgcttcggggagtttccgtcctagtgggcgctcctactccttcttctactacatggacgtc

SEQ ID NO: 7045 - DNA, 45 bp, synthetic construct
  misc_feature 1..45: note = Synthetic construct
  source 1..45: mol_type = other DNA
gcgagaggccgggggccattgagggggggaagctggttcgactcc

SEQ ID NO: 7046 - DNA, 54 bp, synthetic construct
  misc_feature 1..54: note = Synthetic construct
  source 1..54: mol_type = other DNA
acgagaggccccagaaagtggctacaacaccaatctcgggggggctttgacatc

SEQ ID NO: 7047 - DNA, 48 bp, synthetic construct
  misc_feature 1..48: note = Synthetic construct
  source 1..48: mol_type = other DNA
gcgagaaagggaacttatagcagtggctggtacgatgcttttgatatc

SEQ ID NO: 7048 - DNA, 51 bp, synthetic construct
  misc_feature 1..51: note = Synthetic construct
  source 1..51: mol_type = other DNA
gcgagaggcgcccccaccgttcggggagttattaccaactggttcgacccc

SEQ ID NO: 7049 - DNA, 63 bp, synthetic construct
  misc_feature 1..63: note = Synthetic construct
  source 1..63: mol_type = other DNA
gcgagaggcgtaagatggatggttcggggcggccggtcttactactactactacatggacgtc

SEQ ID NO: 7050 - DNA, 57 bp, synthetic construct
  misc_feature 1..57: note = Synthetic construct
  source 1..57: mol_type = other DNA
gcgagaggctactatagggtgtggaattactatggttcgggcaactacacggacgtc

SEQ ID NO: 7051 - DNA, 54 bp, synthetic construct
  misc_feature 1..54: note = Synthetic construct
  source 1..54: mol_type = other DNA
gcgagaggctgggcccactatagggttcggggagctaagcgttattttgactac

SEQ ID NO: 7052 - DNA, 51 bp, synthetic construct
  misc_feature 1..51: note = Synthetic construct
  source 1..51: mol_type = other DNA
gcgagagggggccggattgtagtagtaccagctgctagctactttgactac

SEQ ID NO: 7053 - DNA, 42 bp, synthetic construct
  misc_feature 1..42: note = Synthetic construct
  source 1..42: mol_type = other DNA
gcgagattatcatttggttcgggggatgatgcttttgatatc

SEQ ID NO: 7054 - DNA, 57 bp, synthetic construct
  misc_feature 1..57: note = Synthetic construct
  source 1..57: mol_type = other DNA
acgagaggccttagagcagtggttggtacttcctacaactactactacatggacgtc

SEQ ID NO: 7055 - DNA, 78 bp, synthetic construct
  misc_feature 1..78: note = Synthetic construct
  source 1..78: mol_type = other DNA
gcgagagtccttggggaggcggaatccgattatttgactggttctcatcttcgttactactactactacatggacgtc

SEQ ID NO: 7056 - DNA, 42 bp, synthetic construct
  misc_feature 1..42: note = Synthetic construct
  source 1..42: mol_type = other DNA
gcgagaggccttgggaagcagtggttcagctgcttcgacccc

SEQ ID NO: 7057 - DNA, 33 bp, synthetic construct
  misc_feature 1..33: note = Synthetic construct
  source 1..33: mol_type = other DNA
gcgagagttactaacagaggctggtatagggcc

SEQ ID NO: 7058 - DNA, 66 bp, synthetic construct
  misc_feature 1..66: note = Synthetic construct
  source 1..66: mol_type = other DNA
gcgagagggggagcctattccgatttttggagtggctttccaaatgcccgagccttctttgactcc

SEQ ID NO: 7059 - DNA, 60 bp, synthetic construct
  misc_feature 1..60: note = Synthetic construct
  source 1..60: mol_type = other DNA
tcgagaggaaatgccgggatagccggtcatatttttcacttcctctactacatcgacgtc

SEQ ID NO: 7060 - DNA, 39 bp, synthetic construct
  misc_feature 1..39: note = Synthetic construct
  source 1..39: mol_type = other DNA
gcgagagatggcccgggaaagaactacttcttggacgtc

SEQ ID NO: 7061 - DNA, 42 bp, synthetic construct
  misc_feature 1..42: note = Synthetic construct
  source 1..42: mol_type = other DNA
gccagagtctacaatggagatggcaacaaccccattgactac

SEQ ID NO: 7062 - DNA, 60 bp, synthetic construct
  misc_feature 1..60: note = Synthetic construct
  source 1..60: mol_type = other DNA
gccagagggtccctggatgatgatagtagtggttattactcctactactatatggacgtc

SEQ ID NO: 7063 - DNA, 45 bp, synthetic construct
  misc_feature 1..45: note = Synthetic construct
  source 1..45: mol_type = other DNA
gccagagccaagggagatggctacattgggggcatttttgactcc

SEQ ID NO: 7064 - DNA, 51 bp, synthetic construct
  misc_feature 1..51: note = Synthetic construct
  source 1..51: mol_type = other DNA
gcgagactgaattactatgatcgtaatggtcattactattactttgactac

SEQ ID NO: 7065 - DNA, 45 bp, synthetic construct
  misc_feature 1..45: note = Synthetic construct
  source 1..45: mol_type = other DNA
gcgagaaacttcggtgactacgcctacccctacttctttgacttc

SEQ ID NO: 7066 - DNA, 48 bp, synthetic construct
  misc_feature 1..48: note = Synthetic construct
  source 1..48: mol_type = other DNA
gcgagaggtattattttgagtgggtcccccctctactacctggacgtc

SEQ ID NO: 7067 - DNA, 36 bp, synthetic construct
  misc_feature 1..36: note = Synthetic construct
  source 1..36: mol_type = other DNA
gcgagattcgcccgactagactactacatggacgtc

SEQ ID NO: 7068 - DNA, 63 bp, synthetic construct
  misc_feature 1..63: note = Synthetic construct
  source 1..63: mol_type = other DNA
gcccgactttactggggttgtactaatggtgtatgctcctactactactactacatggacgtc

SEQ ID NO: 7069 - DNA, 57 bp, synthetic construct
  misc_feature 1..57: note = Synthetic construct
  source 1..57: mol_type = other DNA
gcgagaatcccgaccccgaatgtgggatatacagctgggtactactacatggacgtc

SEQ ID NO: 7070 - DNA, 39 bp, synthetic construct
  misc_feature 1..39: note = Synthetic construct
  source 1..39: mol_type = other DNA
gcgagagaaaggcatgactacgtaggagcttttgatatc

SEQ ID NO: 7071 - DNA, 54 bp, synthetic construct
  misc_feature 1..54: note = Synthetic construct
  source 1..54: mol_type = other DNA
gcgagagaaggaagcagcagctggtacacgacctggggatgggcttttgatatc

SEQ ID NO: 7072 - DNA, 39 bp, synthetic construct
  misc_feature 1..39: note = Synthetic construct
  source 1..39: mol_type = other DNA
gcgagagataatcagattactaaggatgcttttgatatc

SEQ ID NO: 7073 - DNA, 51 bp, synthetic construct
  misc_feature 1..51: note = Synthetic construct
  source 1..51: mol_type = other DNA
gcgagagatcggagctatagtggctactactactactactacatggacgtc

SEQ ID NO: 7074 - DNA, 30 bp, synthetic construct
  misc_feature 1..30: note = Synthetic construct
  source 1..30: mol_type = other DNA
gcgagcggtattggtgactactttgactac

SEQ ID NO: 7075 - DNA, 54 bp, synthetic construct
  misc_feature 1..54: note = Synthetic construct
  source 1..54: mol_type = other DNA
gcgagacgacattcggagcagtggctgttaaggggccctggtgcttttgatatc

SEQ ID NO: 7076 - DNA, 42 bp, synthetic construct
  misc_feature 1..42: note = Synthetic construct
  source 1..42: mol_type = other DNA
gcgagagggtcggaatggcgtctctattactactttgactac

SEQ ID NO: 7077 - DNA, 45 bp, synthetic construct
  misc_feature 1..45: note = Synthetic construct
  source 1..45: mol_type = other DNA
gcgagacgggtggtggtagatcctactctcgggtcatttgatatc

SEQ ID NO: 7078 - DNA, 30 bp, synthetic construct
  misc_feature 1..30: note = Synthetic construct
  source 1..30: mol_type = other DNA
gcgagagatcgcaggggatacagcttttac

SEQ ID NO: 7079 - DNA, 57 bp, synthetic construct
  misc_feature 1..57: note = Synthetic construct
  source 1..57: mol_type = other DNA
gcgagagagttttattactctgatagtaatgattttccatttcatgtttttgatatc

SEQ ID NO: 7080 - DNA, 33 bp, synthetic construct
  misc_feature 1..33: note = Synthetic construct
  source 1..33: mol_type = other DNA
gcgagagagggtataggcggagctactgatatc

SEQ ID NO: 7081 - DNA, 51 bp, synthetic construct
  misc_feature 1..51: note = Synthetic construct
  source 1..51: mol_type = other DNA
gcgagagatctcggctacggtggtaactccccccactggtacttcgatctc

SEQ ID NO: 7082 - DNA, 42 bp, synthetic construct
  misc_feature 1..42: note = Synthetic construct
  source 1..42: mol_type = other DNA
gcgagagcggactacggtgactacgaggactactttgactac

SEQ ID NO: 7083 - DNA, 33 bp, synthetic construct
  misc_feature 1..33: note = Synthetic construct
  source 1..33: mol_type = other DNA
gcgagaggcggcggaggggggtggttcgacccc

SEQ ID NO: 7084 - DNA, 48 bp, synthetic construct
  misc_feature 1..48: note = Synthetic construct
  source 1..48: mol_type = other DNA
gcgagagggggactctatggttcggggagagtaaactggttcgacccc

SEQ ID NO: 7085 - DNA, 36 bp, synthetic construct
  misc_feature 1..36: note = Synthetic construct
  source 1..36: mol_type = other DNA
gcgagatcccgttcgaggcagcagccaaatgactac

SEQ ID NO: 7086 - DNA, 42 bp, synthetic construct
  misc_feature 1..42: note = Synthetic construct
  source 1..42: mol_type = other DNA
gcgagagatcgtaagggtagtgacggtgatagcatggacgtc

SEQ ID NO: 7087 - DNA, 57 bp, synthetic construct
  misc_feature 1..57: note = Synthetic construct
  source 1..57: mol_type = other DNA
gcgagggcccgacaccgatactacgattctttgactggccaggggtcctttgattac

SEQ ID NO: 7088 - DNA, 36 bp, synthetic construct
  misc_feature 1..36: note = Synthetic construct
  source 1..36: mol_type = other DNA
gtgagagggggagatatagagactaccatggagttc

SEQ ID NO: 7089 - DNA, 48 bp, synthetic construct
  misc_feature 1..48: note = Synthetic construct
  source 1..48: mol_type = other DNA
gcgcgaaatgggcctaagtggaacaattactactactacatggacgtc

SEQ ID NO: 7090 - DNA, 42 bp, synthetic construct
  misc_feature 1..42: note = Synthetic construct
  source 1..42: mol_type = other DNA
gtgaggacccttagagatggcttcaattcctggttcgacccc

SEQ ID NO: 7091 - DNA, 45 bp, synthetic construct
  misc_feature 1..45: note = Synthetic construct
  source 1..45: mol_type = other DNA
gcgagaggcccacccatagacgactactactactacatggacgtc

SEQ ID NO: 7092 - DNA, 63 bp, synthetic construct
  misc_feature 1..63: note = Synthetic construct
  source 1..63: mol_type = other DNA
actagacatctgatgaattttgatttctggagtggctattatacggtgaacgcttttgatatc

SEQ ID NO: 7093 - DNA, 45 bp, synthetic construct
  misc_feature 1..45: note = Synthetic construct
  source 1..45: mol_type = other DNA
gcgagaaggacatatgctgttaacggtgattactactttgactcc

SEQ ID NO: 7094 - DNA, 63 bp, synthetic construct
  misc_feature 1..63: note = Synthetic construct
  source 1..63: mol_type = other DNA
gcgcgaggccttttttattttgggtcggggacttatgcacgagatccacggagttgggggtac

SEQ ID NO: 7095 - DNA, 60 bp, synthetic construct
  misc_feature 1..60: note = Synthetic construct
  source 1..60: mol_type = other DNA
gcgagaggggaggcgatagtattgtttggggagctgttaaaacgcccttatatggatgtc

SEQ ID NO: 7096 - DNA, 48 bp, synthetic construct
  misc_feature 1..48: note = Synthetic construct
  source 1..48: mol_type = other DNA
gcgagaggctcagcacgtctagcagcaggaagaagtgcttttgatttc

SEQ ID NO: 7097 - DNA, 51 bp, synthetic construct
  misc_feature 1..51: note = Synthetic construct
  source 1..51: mol_type = other DNA
gcgaggacccccccatatagtggctacgattacgaaggctactttgactac

SEQ ID NO: 7098 - DNA, 45 bp, synthetic construct
  misc_feature 1..45: note = Synthetic construct
  source 1..45: mol_type = other DNA
gcgagaggggactggtttcagggtagtggccttccttttgactcc

SEQ ID NO: 7099 - DNA, 36 bp, synthetic construct
  misc_feature 1..36: note = Synthetic construct
  source 1..36: mol_type = other DNA
gccagggctgggaggggcccaagtgtctttgactac

SEQ ID NO: 7100 - DNA, 45 bp, synthetic construct
  misc_feature 1..45: note = Synthetic construct
  source 1..45: mol_type = other DNA
gcgacgtatgattcggggagttattaccaatctcccttagacttc

SEQ ID NO: 7101 - DNA, 42 bp, synthetic construct
  misc_feature 1..42: note = Synthetic construct
  source 1..42: mol_type = other DNA
gcgagacattcagattggatacagttgtggttctttgacttc

SEQ ID NO: 7102 - DNA, 84 bp, synthetic construct
  misc_feature 1..84: note = Synthetic construct
  source 1..84: mol_type = other DNA
gcgcgagtggcagcgtatcacaatgcttcggggagtttccgtcctagtgggcgctcctactccttcttctactacatggacgtc

SEQ ID NO: 7103 - DNA, 42 bp, synthetic construct
  misc_feature 1..42: note = Synthetic construct
  source 1..42: mol_type = other DNA
gcgagaatgggggcatatggcagtggcttttatgggggatac

SEQ ID NO: 7104 - DNA, 18 bp, synthetic construct
  misc_feature 1..18: note = Synthetic construct
  source 1..18: mol_type = other DNA
acgagaagtgatagacac

SEQ ID NO: 7105 - DNA, 54 bp, synthetic construct
  misc_feature 1..54: note = Synthetic construct
  source 1..54: mol_type = other DNA
gcgagacacggaggaagtacaccccactatattcgagtgaactggttcggcccc

SEQ ID NO: 7106 - DNA, 42 bp, synthetic construct
  misc_feature 1..42: note = Synthetic construct
  source 1..42: mol_type = other DNA
gcgagacaaacttcgcttgggggagttatcgcttttgacatc

SEQ ID NO: 7107 - DNA, 69 bp, synthetic construct
  misc_feature 1..69: note = Synthetic construct
  source 1..69: mol_type = other DNA
gcgacccatcctcgtgggacatttgagggagcccatgactattactactactactactacatggacgtc

SEQ ID NO: 7108 - DNA, 39 bp, synthetic construct
  misc_feature 1..39: note = Synthetic construct
  source 1..39: mol_type = other DNA
gcgagacacccctacggtggtaactccgggcaggactac

SEQ ID NO: 7109 - DNA, 54 bp, synthetic construct
  misc_feature 1..54: note = Synthetic construct
  source 1..54: mol_type = other DNA
gcgagatcaattcctttggaatatagtagtcaaacggggggtttgttcgacccc

SEQ ID NO: 7110 - DNA, 63 bp, synthetic construct
  misc_feature 1..63: note = Synthetic construct
  source 1..63: mol_type = other DNA
gcgagacggccgcccggcgattgtactaatggtgtatgctccacgcaaaggtggttcgacccc

SEQ ID NO: 7111 - DNA, 48 bp, synthetic construct
  misc_feature 1..48: note = Synthetic construct
  source 1..48: mol_type = other DNA
gcgagagctagcagctcgtccaaatactactactactacatggacgtc

SEQ ID NO: 7112 - DNA, 42 bp, synthetic construct
  misc_feature 1..42: note = Synthetic construct
  source 1..42: mol_type = other DNA
gcgagacggggagtgggagctacgaggaaggcttttgatatc

SEQ ID NO: 7113 - DNA, 51 bp, synthetic construct
  misc_feature 1..51: note = Synthetic construct
  source 1..51: mol_type = other DNA
gtgagacacgactacagtagcttttactactactactacttcatggacgtc

SEQ ID NO: 7114 - DNA, 30 bp, synthetic construct
  misc_feature 1..30: note = Synthetic construct
  source 1..30: mol_type = other DNA
gcgagcgcattagcagctggtaaatactac

SEQ ID NO: 7115 - DNA, 39 bp, synthetic construct
  misc_feature 1..39: note = Synthetic construct
  source 1..39: mol_type = other DNA
gcgagactcttaagcctgaggaatgcggcttttgatatc

SEQ ID NO: 7116 - DNA, 48 bp, synthetic construct
  misc_feature 1..48: note = Synthetic construct
  source 1..48: mol_type = other DNA
gcgagagattatattgatgtaacccacggctacagttgtttcgacccc

SEQ ID NO: 7117 - DNA, 57 bp, synthetic construct
  misc_feature 1..57: note = Synthetic construct
  source 1..57: mol_type = other DNA
gcgagagactttgatcaaggatattattcttcggggagttattcctggttcgacgcc

SEQ ID NO: 7118 - DNA, 45 bp, synthetic construct
  misc_feature 1..45: note = Synthetic construct
  source 1..45: mol_type = other DNA
gtgagagggggccgggcaactttgaccaacgcggactttgactac

SEQ ID NO: 7119 - DNA, 45 bp, synthetic construct
  misc_feature 1..45: note = Synthetic construct
  source 1..45: mol_type = other DNA
gcgagaacatatagtagtggttattatagtgatgcttttgatatc

SEQ ID NO: 7120 - DNA, 45 bp, synthetic construct
  misc_feature 1..45: note = Synthetic construct
  source 1..45: mol_type = other DNA
gtgagaaccccagcgttaggggagttagttggatacttccagccc

SEQ ID NO: 7121 - DNA, 57 bp, synthetic construct
  misc_feature 1..57: note = Synthetic construct
  source 1..57: mol_type = other DNA
gcgagagacgcatataattactatgcttcgaggagccgatacggttactttgactac

SEQ ID NO: 7122 - DNA, 57 bp, synthetic construct
  misc_feature 1..57: note = Synthetic construct
  source 1..57: mol_type = other DNA
gcgcgagacgggacgccggctgagcgacggtcctactcctactcctacatggacgtc

SEQ ID NO: 7123 - DNA, 36 bp, synthetic construct
  misc_feature 1..36: note = Synthetic construct
  source 1..36: mol_type = other DNA
gcgagaggggagtatctcggctactacatggacgtc

SEQ ID NO: 7124 - DNA, 63 bp, synthetic construct
  misc_feature 1..63: note = Synthetic construct
  source 1..63: mol_type = other DNA
gcgagaatgccgaatcttatggatacagctatggtttcctactactactactacatggacgtc

SEQ ID NO: 7125 - DNA, 42 bp, synthetic construct
  misc_feature 1..42: note = Synthetic construct
  source 1..42: mol_type = other DNA
gcgagaggggatgatagtagtggttatgccccctttgactac

SEQ ID NO: 7126 - DNA, 39 bp, synthetic construct
  misc_feature 1..39: note = Synthetic construct
  source 1..39: mol_type = other DNA
gcgagagtcaatactatggttcggggaacttttgactac

SEQ ID NO: 7127 - DNA, 60 bp, synthetic construct
  misc_feature 1..60: note = Synthetic construct
  source 1..60: mol_type = other DNA
gcgtcaacgtattactatgatagtagtgggggaagacgggttcctgttgcttttgaaatc

SEQ ID NO: 7128 - DNA, 51 bp, synthetic construct
  misc_feature 1..51: note = Synthetic construct
  source 1..51: mol_type = other DNA
gcgtcgaggggttcggggagttattataaagggggttactactttgactac

SEQ ID NO: 7129 - DNA, 57 bp, synthetic construct
  misc_feature 1..57: note = Synthetic construct
  source 1..57: mol_type = other DNA
gcgagagcgatggattactctgatagtagtggtgattattactattacttcgatctc

SEQ ID NO: 7130 - DNA, 48 bp, synthetic construct
  misc_feature 1..48: note = Synthetic construct
  source 1..48: mol_type = other DNA
gtgagagagagctcttatggttcggggactagcaaatacttcgacccc

SEQ ID NO: 7131 - DNA, 39 bp, synthetic construct
  misc_feature 1..39: note = Synthetic construct
  source 1..39: mol_type = other DNA
gtgagacgctggtacggtgactaccccgcctttgactac

SEQ ID NO: 7132 - DNA, 48 bp, synthetic construct
  misc_feature 1..48: note = Synthetic construct
  source 1..48: mol_type = other DNA
gcgagagtcttgtgtagtggtcgtaagtgccaaggggatttcgactac

SEQ ID NO: 7133 - DNA, 54 bp, synthetic construct
  misc_feature 1..54: note = Synthetic construct
  source 1..54: mol_type = other DNA
gcgagacttatggagtcttctgaccccgctaattacttctcctacatggacgtc

SEQ ID NO: 7134 - DNA, 51 bp, synthetic construct
  misc_feature 1..51: note = Synthetic construct
  source 1..51: mol_type = other DNA
gcgaccctgagttcttattatgatattttgactggtttggcctcggacgtc

SEQ ID NO: 7135 - DNA, 42 bp, synthetic construct
  misc_feature 1..42: note = Synthetic construct
  source 1..42: mol_type = other DNA
gcggggagacgctcggggaggggtgattactactttgaattg

SEQ ID NO: 7136 - DNA, 42 bp, synthetic construct
  misc_feature 1..42: note = Synthetic construct
  source 1..42: mol_type = other DNA
gcgagagaaggttactatgatggtagtggttattacactcac

SEQ ID NO: 7137 - DNA, 33 bp, synthetic construct
  misc_feature 1..33: note = Synthetic construct
  source 1..33: mol_type = other DNA
gcgagagtgggcattgcagcaggtgtcgacgtc

SEQ ID NO: 7138 - DNA, 66 bp, synthetic construct
  misc_feature 1..66: note = Synthetic construct
  source 1..66: mol_type = other DNA
gcgagagagagggcggattacgatctttttactggttatccctcacgcccagatgcttttgaaatc

SEQ ID NO: 7139 - DNA, 54 bp, synthetic construct
  misc_feature 1..54: note = Synthetic construct
  source 1..54: mol_type = other DNA
gcgagacgcctggggtgggaacagggcggccgtcactcctactacatggacgtc

SEQ ID NO: 7140 - DNA, 48 bp, synthetic construct
  misc_feature 1..48: note = Synthetic construct
  source 1..48: mol_type = other DNA
gccagagatgggggctacgatgcagtcttattctactacctgggcgtc

SEQ ID NO: 7141 - DNA, 36 bp, synthetic construct
  misc_feature 1..36: note = Synthetic construct
  source 1..36: mol_type = other DNA
gggaggatccatgatagtggttggttcgttctttat

SEQ ID NO: 7142 - DNA, 45 bp, synthetic construct
  misc_feature 1..45: note = Synthetic construct
  source 1..45: mol_type = other DNA
gcgaggcacccgcggaagttcggggagttattgggatttgactcc

SEQ ID NO: 7143 - DNA, 48 bp, synthetic construct
  misc_feature 1..48: note = Synthetic construct
  source 1..48: mol_type = other DNA
gcggcggagggaggtgattgtcttaatggtgtgtgctataaagtctcc

SEQ ID NO: 7144 - DNA, 33 bp, synthetic construct
  misc_feature 1..33: note = Synthetic construct
  source 1..33: mol_type = other DNA
gcgagaggtctgtcctcagtggctggcacgggg

SEQ ID NO: 7145 - DNA, 45 bp, synthetic construct
  misc_feature 1..45: note = Synthetic construct
  source 1..45: mol_type = other DNA
gcatcagcagagcagtggcccacggagcacgacgcttttgatatc

SEQ ID NO: 7146 - DNA, 60 bp, synthetic construct; identical to SEQ ID NO: 1816
  misc_feature 1..60: note = Synthetic construct
  source 1..60: mol_type = other DNA

SEQ ID NO: 7147 - DNA, 51 bp, synthetic construct
  misc_feature 1..51: note = Synthetic construct
  source 1..51: mol_type = other DNA
gcgagaggaggcggtgggttcagtcatggccgcctcaaggctcttgatgtc

SEQ ID NO: 7148 - DNA, 48 bp, synthetic construct
  misc_feature 1..48: note = Synthetic construct
  source 1..48: mol_type = other DNA
gcgagagtcggcctgttgcagcaggtggcccatgatgctttggatatc

SEQ ID NO: 7149 - DNA, 45 bp, synthetic construct
  misc_feature 1..45: note = Synthetic construct
  source 1..45: mol_type = other DNA
gcgagaccttgtagtggtgctaactgcttcaacacggcgggtctc

SEQ ID NO: 7150 - DNA, 51 bp, synthetic construct
  misc_feature 1..51: note = Synthetic construct
  source 1..51: mol_type = other DNA
acgagaggccggctgattttcagcagcagccggtacgatgcttttgatatc

SEQ ID NO: 7151 - DNA, 45 bp, synthetic construct
  misc_feature 1..45: note = Synthetic construct
  source 1..45: mol_type = other DNA
gcgagagatatggggcgtattggaagtagcaccgaatttgactgc

SEQ ID NO: 7152 - DNA, 39 bp, synthetic construct
  misc_feature 1..39: note = Synthetic construct
  source 1..39: mol_type = other DNA
gcaacagatcggcgagtggaaactctctactttcacttc

SEQ ID NO: 7153 - DNA, 45 bp, synthetic construct
  misc_feature 1..45: note = Synthetic construct
  source 1..45: mol_type = other DNA
gtacgcgactatgattacgttgggggcagttatcgtcttgaccgg

SEQ ID NO: 7154 - DNA, 45 bp, synthetic construct
  misc_feature 1..45: note = Synthetic construct
  source 1..45: mol_type = other DNA
gcgagacttctcaaggggtccagttggtacaatggtcttgacatc

SEQ ID NO: 7155 - DNA, 42 bp, synthetic construct
  misc_feature 1..42: note = Synthetic construct
  source 1..42: mol_type = other DNA
gcgaaacggtataatactacccacctttggtactttgactcc

SEQ ID NO: 7156 - DNA, 66 bp, synthetic construct; identical to SEQ ID NO: 3259
  misc_feature 1..66: note = Synthetic construct
  source 1..66: mol_type = other DNA

SEQ ID NO: 7157 - DNA, 54 bp, synthetic construct; identical to SEQ ID NO: 3260
  misc_feature 1..54: note = Synthetic construct
  source 1..54: mol_type = other DNA

SEQ ID NO: 7158 - DNA, 57 bp, synthetic construct; identical to SEQ ID NO: 3261
  misc_feature 1..57: note = Synthetic construct
  source 1..57: mol_type = other DNA

SEQ ID NO: 7159 - DNA, 63 bp, synthetic construct; identical to SEQ ID NO: 3262
  misc_feature 1..63: note = Synthetic construct
  source 1..63: mol_type = other DNA

SEQ ID NO: 7160 - DNA, 81 bp, synthetic construct
  misc_feature 1..81: note = Synthetic construct
  source 1..81: mol_type = other DNA
tgcgcgcggggccacagtagctcgtctcaacggtctagcttcgacggtaactttttatactactactatcaccaaatggac

SEQ ID NO: 7161 - DNA, 69 bp, synthetic construct; identical to SEQ ID NO: 3264
  misc_feature 1..69: note = Synthetic construct
  source 1..69: mol_type = other DNA

SEQ ID NO: 7162 - DNA, 54 bp, synthetic construct; identical to SEQ ID NO: 3265
  misc_feature 1..54: note = Synthetic construct
  source 1..54: mol_type = other DNA

SEQ ID NO: 7163 - DNA, 54 bp, synthetic construct; identical to SEQ ID NO: 3266
  misc_feature 1..54: note = Synthetic construct
  source 1..54: mol_type = other DNA

SEQ ID NO: 7164 - DNA, 66 bp, synthetic construct; identical to SEQ ID NO: 3267
  misc_feature 1..66: note = Synthetic construct
  source 1..66: mol_type = other DNA

SEQ ID NO: 7165 - DNA, 39 bp, synthetic construct; identical to SEQ ID NO: 3268
  misc_feature 1..39: note = Synthetic construct
  source 1..39: mol_type = other DNA

SEQ ID NO: 7166 - DNA, 57 bp, synthetic construct; identical to SEQ ID NO: 3269
  misc_feature 1..57: note = Synthetic construct
  source 1..57: mol_type = other DNA

SEQ ID NO: 7167 - DNA, 39 bp, synthetic construct; identical to SEQ ID NO: 3270
  misc_feature 1..39: note = Synthetic construct
  source 1..39: mol_type = other DNA

SEQ ID NO: 7168 - DNA, 45 bp, synthetic construct; identical to SEQ ID NO: 3271
  misc_feature 1..45: note = Synthetic construct
  source 1..45: mol_type = other DNA

SEQ ID NO: 7169 - DNA, 36 bp, synthetic construct; identical to SEQ ID NO: 3272
  misc_feature 1..36: note = Synthetic construct
  source 1..36: mol_type = other DNA

SEQ ID NO: 7170 - DNA, 45 bp, synthetic construct; identical to SEQ ID NO: 3273
  misc_feature 1..45: note = Synthetic construct
  source 1..45: mol_type = other DNA

SEQ ID NO: 7171 - DNA, 54 bp, synthetic construct; identical to SEQ ID NO: 3274
  misc_feature 1..54: note = Synthetic construct
  source 1..54: mol_type = other DNA

SEQ ID NO: 7172 - DNA, 69 bp, synthetic construct; identical to SEQ ID NO: 3275
  misc_feature 1..69: note = Synthetic construct
  source 1..69: mol_type = other DNA

SEQ ID NO: 7173 - DNA, 54 bp, synthetic construct; identical to SEQ ID NO: 3276
  misc_feature 1..54: note = Synthetic construct
  source 1..54: mol_type = other DNA

SEQ ID NO: 7174 - DNA, 45 bp, synthetic construct; identical to SEQ ID NO: 3277
  misc_feature 1..45: note = Synthetic construct
  source 1..45: mol_type = other DNA

SEQ ID NO: 7175 - DNA, 45 bp, synthetic construct; identical to SEQ ID NO: 3278
  misc_feature 1..45: note = Synthetic construct
  source 1..45: mol_type = other DNA

SEQ ID NO: 7176 - DNA, 57 bp, synthetic construct; identical to SEQ ID NO: 3279
  misc_feature 1..57: note = Synthetic construct
  source 1..57: mol_type = other DNA

SEQ ID NO: 7177 - DNA, 45 bp, synthetic construct; identical to SEQ ID NO: 3280
  misc_feature 1..45: note = Synthetic construct
  source 1..45: mol_type = other DNA

SEQ ID NO: 7178 - DNA, 48 bp, synthetic construct; identical to SEQ ID NO: 3281
  misc_feature 1..48: note = Synthetic construct
  source 1..48: mol_type = other DNA

SEQ ID NO: 7179 - DNA, 48 bp, synthetic construct; identical to SEQ ID NO: 3282
  misc_feature 1..48: note = Synthetic construct
  source 1..48: mol_type = other DNA

SEQ ID NO: 7180 - DNA, 36 bp, synthetic construct; identical to SEQ ID NO: 3283
  misc_feature 1..36: note = Synthetic construct
  source 1..36: mol_type = other DNA

SEQ ID NO: 7181 - DNA, 60 bp, synthetic construct; identical to SEQ ID NO: 3284
  misc_feature 1..60: note = Synthetic construct
  source 1..60: mol_type = other DNA

SEQ ID NO: 7182 - DNA, 66 bp, synthetic construct; identical to SEQ ID NO: 3285
  misc_feature 1..66: note = Synthetic construct
  source 1..66: mol_type = other DNA

SEQ ID NO: 7183 - DNA, 75 bp, synthetic construct; identical to SEQ ID NO: 3286
  misc_feature 1..75: note = Synthetic construct
  source 1..75: mol_type = other DNA

SEQ ID NO: 7184 - DNA, 45 bp, synthetic construct; identical to SEQ ID NO: 3287
  misc_feature 1..45: note = Synthetic construct
  source 1..45: mol_type = other DNA

SEQ ID NO: 7185 - DNA, 51 bp, synthetic construct; identical to SEQ ID NO: 3288
  misc_feature 1..51: note = Synthetic construct
  source 1..51: mol_type = other DNA

SEQ ID NO: 7186 - DNA, 39 bp, synthetic construct; identical to SEQ ID NO: 3289
  misc_feature 1..39: note = Synthetic construct
  source 1..39: mol_type = other DNA

SEQ ID NO: 7187 - DNA, 54 bp, synthetic construct; identical to SEQ ID NO: 3290
  misc_feature 1..54: note = Synthetic construct
  source 1..54: mol_type = other DNA

SEQ ID NO: 7188 - DNA, 57 bp, synthetic construct; identical to SEQ ID NO: 3291
  misc_feature 1..57: note = Synthetic construct
  source 1..57: mol_type = other DNA

SEQ ID NO: 7189 - DNA, 75 bp, synthetic construct; identical to SEQ ID NO: 3292
  misc_feature 1..75: note = Synthetic construct
  source 1..75: mol_type = other DNA

SEQ ID NO: 7190 - DNA, 69 bp, synthetic construct; identical to SEQ ID NO: 3293
  misc_feature 1..69: note = Synthetic construct
  source 1..69: mol_type = other DNA

SEQ ID NO: 7191 - DNA, 45 bp, synthetic construct; identical to SEQ ID NO: 3294
  misc_feature 1..45: note = Synthetic construct
  source 1..45: mol_type = other DNA

SEQ ID NO: 7192 - DNA, 42 bp, synthetic construct; identical to SEQ ID NO: 3295
  misc_feature 1..42: note = Synthetic construct
  source 1..42: mol_type = other DNA

SEQ ID NO: 7193 - DNA, 57 bp, synthetic construct; identical to SEQ ID NO: 3296
  misc_feature 1..57: note = Synthetic construct
  source 1..57: mol_type = other DNA

SEQ ID NO: 7194 - DNA, 51 bp, synthetic construct; identical to SEQ ID NO: 3297
  misc_feature 1..51: note = Synthetic construct
  source 1..51: mol_type = other DNA

SEQ ID NO: 7195 - DNA, 42 bp, synthetic construct; identical to SEQ ID NO: 3298
  misc_feature 1..42: note = Synthetic construct
  source 1..42: mol_type = other DNA

SEQ ID NO: 7196 - DNA, 60 bp, synthetic construct; identical to SEQ ID NO: 3299
  misc_feature 1..60: note = Synthetic construct
  source 1..60: mol_type = other DNA

SEQ ID NO: 7197 - DNA, 57 bp, synthetic construct; identical to SEQ ID NO: 3300
  misc_feature 1..57: note = Synthetic construct
  source 1..57: mol_type = other DNA

SEQ ID NO: 7198 - DNA, 69 bp, synthetic construct; identical to SEQ ID NO: 3301
  misc_feature 1..69: note = Synthetic construct
  source 1..69: mol_type = other DNA

SEQ ID NO: 7199 - DNA, 48 bp, synthetic construct; identical to SEQ ID NO: 3302
  misc_feature 1..48: note = Synthetic construct
  source 1..48: mol_type = other DNA

SEQ ID NO: 7200 - DNA, 54 bp, synthetic construct; identical to SEQ ID NO: 1772
  misc_feature 1..54: note = Synthetic construct
  source 1..54: mol_type = other DNA

SEQ ID NO: 7201 - DNA, 60 bp, synthetic construct; identical to SEQ ID NO: 3304
  misc_feature 1..60: note = Synthetic construct
  source 1..60: mol_type = other DNA

SEQ ID NO: 7202 - DNA, 36 bp, synthetic construct; identical to SEQ ID NO: 3305
  misc_feature 1..36: note = Synthetic construct
  source 1..36: mol_type = other DNA

SEQ ID NO: 7203 - DNA, 51 bp, synthetic construct; identical to SEQ ID NO: 3306
  misc_feature 1..51: note = Synthetic construct
  source 1..51: mol_type = other DNA

SEQ ID NO: 7204 - DNA, 69 bp, synthetic construct; identical to SEQ ID NO: 3307
  misc_feature 1..69: note = Synthetic construct
  source 1..69: mol_type = other DNA

SEQ ID NO: 7205 - DNA, 36 bp, synthetic construct; identical to SEQ ID NO: 3308
  misc_feature 1..36: note = Synthetic construct
  source 1..36: mol_type = other DNA

SEQ ID NO: 7206 - DNA, 75 bp, synthetic construct; identical to SEQ ID NO: 3309
  misc_feature 1..75: note = Synthetic construct
  source 1..75: mol_type = other DNA

SEQ ID NO: 7207 - DNA, 51 bp, synthetic construct; identical to SEQ ID NO: 3310
  misc_feature 1..51: note = Synthetic construct
  source 1..51: mol_type = other DNA

SEQ ID NO: 7208 - DNA, 66 bp, synthetic construct; identical to SEQ ID NO: 3311
  misc_feature 1..66: note = Synthetic construct
  source 1..66: mol_type = other DNA

SEQ ID NO: 7209 - DNA, 57 bp, synthetic construct; identical to SEQ ID NO: 3312
  misc_feature 1..57: note = Synthetic construct
  source 1..57: mol_type = other DNA

SEQ ID NO: 7210 - DNA, 54 bp, synthetic construct; identical to SEQ ID NO: 3313
  misc_feature 1..54: note = Synthetic construct
  source 1..54: mol_type = other DNA

SEQ ID NO: 7211 - DNA, 60 bp, synthetic construct; identical to SEQ ID NO: 3314
  misc_feature 1..60: note = Synthetic construct
  source 1..60: mol_type = other DNA

SEQ ID NO: 7212 - DNA, 60 bp, synthetic construct; identical to SEQ ID NO: 3315
  misc_feature 1..60: note = Synthetic construct
  source 1..60: mol_type = other DNA

SEQ ID NO: 7213 - DNA, 57 bp, synthetic construct; identical to SEQ ID NO: 3316
  misc_feature 1..57: note = Synthetic construct
  source 1..57: mol_type = other DNA

SEQ ID NO: 7214 - DNA, 57 bp, synthetic construct; identical to SEQ ID NO: 3317
  misc_feature 1..57: note = Synthetic construct
  source 1..57: mol_type = other DNA

SEQ ID NO: 7215 - DNA, 30 bp, synthetic construct; identical to SEQ ID NO: 3318
  misc_feature 1..30: note = Synthetic construct
  source 1..30: mol_type = other DNA

SEQ ID NO: 7216 - DNA, 75 bp, synthetic construct; identical to SEQ ID NO: 3319
  misc_feature 1..75: note = Synthetic construct
  source 1..75: mol_type = other DNA

SEQ ID NO: 7217 - DNA, 66 bp, synthetic construct; identical to SEQ ID NO: 3320
  misc_feature 1..66: note = Synthetic construct
  source 1..66: mol_type = other DNA

SEQ ID NO: 7218 - DNA, 60 bp, synthetic construct; identical to SEQ ID NO: 3321
  misc_feature 1..60: note = Synthetic construct
  source 1..60: mol_type = other DNA

SEQ ID NO: 7219 - DNA, 63 bp, synthetic construct; identical to SEQ ID NO: 3322
  misc_feature 1..63: note = Synthetic construct
  source 1..63: mol_type = other DNA

SEQ ID NO: 7220 - DNA, 57 bp, synthetic construct; identical to SEQ ID NO: 3323
  misc_feature 1..57: note = Synthetic construct
  source 1..57: mol_type = other DNA

SEQ ID NO: 7221 - DNA, 78 bp, synthetic construct; identical to SEQ ID NO: 3324
  misc_feature 1..78: note = Synthetic construct
  source 1..78: mol_type = other DNA

SEQ ID NO: 7222 - DNA, 60 bp, synthetic construct; identical to SEQ ID NO: 3325
  misc_feature 1..60: note = Synthetic construct
  source 1..60: mol_type = other DNA

SEQ ID NO: 7223 - DNA, 51 bp, synthetic construct; identical to SEQ ID NO: 3326
  misc_feature 1..51: note = Synthetic construct
  source 1..51: mol_type = other DNA

SEQ ID NO: 7224 - DNA, 39 bp, synthetic construct; identical to SEQ ID NO: 3327
  misc_feature 1..39: note = Synthetic construct
  source 1..39: mol_type = other DNA

SEQ ID NO: 7225 - DNA, 57 bp, synthetic construct; identical to SEQ ID NO: 3328
  misc_feature 1..57: note = Synthetic construct
  source 1..57: mol_type = other DNA

SEQ ID NO: 7226 - DNA, 39 bp, synthetic construct; identical to SEQ ID NO: 3329
  misc_feature 1..39: note = Synthetic construct
  source 1..39: mol_type = other DNA

SEQ ID NO: 7227 - DNA, 45 bp, synthetic construct; identical to SEQ ID NO: 3330
  misc_feature 1..45: note = Synthetic construct
  source 1..45: mol_type = other DNA

SEQ ID NO: 7228 - DNA, 75 bp, synthetic construct; identical to SEQ ID NO: 3331
  misc_feature 1..75: note = Synthetic construct
  source 1..75: mol_type = other DNA

SEQ ID NO: 7229 - DNA, 66 bp, synthetic construct; identical to SEQ ID NO: 3332
  misc_feature 1..66: note = Synthetic construct
  source 1..66: mol_type = other DNA

SEQ ID NO: 7230 - DNA, 42 bp, synthetic construct; identical to SEQ ID NO: 3333
  misc_feature 1..42: note = Synthetic construct
  source 1..42: mol_type = other DNA

SEQ ID NO: 7231 - DNA, 72 bp, synthetic construct; identical to SEQ ID NO: 3334
  misc_feature 1..72: note = Synthetic construct
  source 1..72: mol_type = other DNA

SEQ ID NO: 7232 - DNA, 45 bp, synthetic construct; identical to SEQ ID NO: 3335
  misc_feature 1..45: note = Synthetic construct
  source 1..45: mol_type = other DNA

SEQ ID NO: 7233 - DNA, 42 bp, synthetic construct; identical to SEQ ID NO: 3336
  misc_feature 1..42: note = Synthetic construct
  source 1..42: mol_type = other DNA

SEQ ID NO: 7234 - DNA, 33 bp, synthetic construct; identical to SEQ ID NO: 3337
  misc_feature 1..33: note = Synthetic construct
  source 1..33: mol_type = other DNA

SEQ ID NO: 7235 - DNA, 48 bp, synthetic construct; identical to SEQ ID NO: 3338
  misc_feature 1..48: note = Synthetic construct
  source 1..48: mol_type = other DNA

SEQ ID NO: 7236 - DNA, 54 bp, synthetic construct; identical to SEQ ID NO: 3339
  misc_feature 1..54: note = Synthetic construct
  source 1..54: mol_type = other DNA

SEQ ID NO: 7237 - DNA, 60 bp, synthetic construct; identical to SEQ ID NO: 3340
  misc_feature 1..60: note = Synthetic construct
  source 1..60: mol_type = other DNA

SEQ ID NO: 7238 - DNA, 48 bp, synthetic construct; identical to SEQ ID NO: 3341
  misc_feature 1..48: note = Synthetic construct
  source 1..48: mol_type = other DNA

SEQ ID NO: 7239 - DNA, 60 bp, synthetic construct; identical to SEQ ID NO: 3342
  misc_feature 1..60: note = Synthetic construct
  source 1..60: mol_type = other DNA

SEQ ID NO: 7240 - DNA, 51 bp, synthetic construct; identical to SEQ ID NO: 3343
  misc_feature 1..51: note = Synthetic construct
  source 1..51: mol_type = other DNA

SEQ ID NO: 7241 - DNA, 69 bp, synthetic construct; identical to SEQ ID NO: 3344
  misc_feature 1..69: note = Synthetic construct
  source 1..69: mol_type = other DNA

SEQ ID NO: 7242 - DNA, 48 bp, synthetic construct; identical to SEQ ID NO: 3345
  misc_feature 1..48: note = Synthetic construct
  source 1..48: mol_type = other DNA

SEQ ID NO: 7243 - DNA, 54 bp, synthetic construct; identical to SEQ ID NO: 3346
  misc_feature 1..54: note = Synthetic construct
  source 1..54: mol_type = other DNA

SEQ ID NO: 7244 - DNA, 42 bp, synthetic construct; identical to SEQ ID NO: 3347
  misc_feature 1..42: note = Synthetic construct
  source 1..42: mol_type = other DNA

SEQ ID NO: 7245 - DNA, 33 bp, synthetic construct; identical to SEQ ID NO: 3348
  misc_feature 1..33: note = Synthetic construct
  source 1..33: mol_type = other DNA

SEQ ID NO: 7246 - DNA, 51 bp, synthetic construct; identical to SEQ ID NO: 3349
  misc_feature 1..51: note = Synthetic construct
  source 1..51: mol_type = other DNA

SEQ ID NO: 7247 - DNA, 69 bp, synthetic construct; identical to SEQ ID NO: 3350
  misc_feature 1..69: note = Synthetic construct
  source 1..69: mol_type = other DNA

SEQ ID NO: 7248 - DNA, 54 bp, synthetic construct; identical to SEQ ID NO: 3351
  misc_feature 1..54: note = Synthetic construct
  source 1..54: mol_type = other DNA

SEQ ID NO: 7249 - DNA, 51 bp, synthetic construct; identical to SEQ ID NO: 3352
  misc_feature 1..51: note = Synthetic construct
  source 1..51: mol_type = other DNA

SEQ ID NO: 7250 - DNA, 60 bp, synthetic construct; identical to SEQ ID NO: 3353
  misc_feature 1..60: note = Synthetic construct
  source 1..60: mol_type = other DNA

SEQ ID NO: 7251 - DNA, 60 bp, synthetic construct; identical to SEQ ID NO: 3354
  misc_feature 1..60: note = Synthetic construct
  source 1..60: mol_type = other DNA

SEQ ID NO: 7252 - DNA, 51 bp, synthetic construct; identical to SEQ ID NO: 3355
  misc_feature 1..51: note = Synthetic construct
  source 1..51: mol_type = other DNA

SEQ ID NO: 7253 - DNA, 48 bp, synthetic construct; identical to SEQ ID NO: 3356
  misc_feature 1..48: note = Synthetic construct
  source 1..48: mol_type = other DNA

SEQ ID NO: 7254 - DNA, 39 bp, synthetic construct; identical to SEQ ID NO: 3357
  misc_feature 1..39: note = Synthetic construct
  source 1..39: mol_type = other DNA

SEQ ID NO: 7255 - DNA, 57 bp, synthetic construct; identical to SEQ ID NO: 3358
  misc_feature 1..57: note = Synthetic construct
  source 1..57: mol_type = other DNA

SEQ ID NO: 7256 - DNA, 54 bp, synthetic construct; identical to SEQ ID NO: 3359
  misc_feature 1..54: note = Synthetic construct
  source 1..54: mol_type = other DNA

SEQ ID NO: 7257 - DNA, 60 bp, synthetic construct; identical to SEQ ID NO: 3360
  misc_feature 1..60: note = Synthetic construct
  source 1..60: mol_type = other DNA

SEQ ID NO: 7258 - DNA, 45 bp, synthetic construct; identical to SEQ ID NO: 3361
  misc_feature 1..45: note = Synthetic construct
  source 1..45: mol_type = other DNA

SEQ ID NO: 7259 - DNA, 51 bp, synthetic construct; identical to SEQ ID NO: 3362
  misc_feature 1..51: note = Synthetic construct
  source 1..51: mol_type = other DNA

SEQ ID NO: 7260 - DNA, 51 bp, synthetic construct; identical to SEQ ID NO: 3363
  misc_feature 1..51: note = Synthetic construct
  source 1..51: mol_type = other DNA

SEQ ID NO: 7261 - DNA, 69 bp, synthetic construct; identical to SEQ ID NO: 3364
  misc_feature 1..69: note = Synthetic construct
  source 1..69: mol_type = other DNA

SEQ ID NO: 7262 - DNA, 54 bp, synthetic construct; identical to SEQ ID NO: 3365
  misc_feature 1..54: note = Synthetic construct
  source 1..54: mol_type = other DNA

SEQ ID NO: 7263 - DNA, 42 bp, synthetic construct; identical to SEQ ID NO: 3366
  misc_feature 1..42: note = Synthetic construct
  source 1..42: mol_type = other DNA

SEQ ID NO: 7264 - DNA, 81 bp, synthetic construct; identical to SEQ ID NO: 3367
  misc_feature 1..81: note = Synthetic construct
  source 1..81: mol_type = other DNA

SEQ ID NO: 7265 - DNA, 48 bp, synthetic construct; identical to SEQ ID NO: 3368
  misc_feature 1..48: note = Synthetic construct
  source 1..48: mol_type = other DNA

SEQ ID NO: 7266 - DNA, 51 bp, synthetic construct; identical to SEQ ID NO: 3369
  misc_feature 1..51: note = Synthetic construct
  source 1..51: mol_type = other DNA

SEQ ID NO: 7267 - DNA, 51 bp, synthetic construct; identical to SEQ ID NO: 3370
  misc_feature 1..51: note = Synthetic construct
  source 1..51: mol_type = other DNA

SEQ ID NO: 7268 - DNA, 57 bp, synthetic construct; identical to SEQ ID NO: 3371
  misc_feature 1..57: note = Synthetic construct
  source 1..57: mol_type = other DNA

SEQ ID NO: 7269 - DNA, 51 bp, synthetic construct; identical to SEQ ID NO: 3372
  misc_feature 1..51: note = Synthetic construct
  source 1..51: mol_type = other DNA

SEQ ID NO: 7270 - DNA, 51 bp, synthetic construct; identical to SEQ ID NO: 3373
  misc_feature 1..51: note = Synthetic construct
  source 1..51: mol_type = other DNA

SEQ ID NO: 7271 - DNA, 42 bp, synthetic construct; identical to SEQ ID NO: 3374
  misc_feature 1..42: note = Synthetic construct
  source 1..42: mol_type = other DNA

SEQ ID NO: 7272 - DNA, 57 bp, synthetic construct; identical to SEQ ID NO: 3375
  misc_feature 1..57: note = Synthetic construct
  source 1..57: mol_type = other DNA

SEQ ID NO: 7273 - DNA, 57 bp, synthetic construct; identical to SEQ ID NO: 3376
  misc_feature 1..57: note = Synthetic construct
  source 1..57: mol_type = other DNA

SEQ ID NO: 7274 - DNA, 54 bp, synthetic construct; identical to SEQ ID NO: 3377
  misc_feature 1..54: note = Synthetic construct
  source 1..54: mol_type = other DNA

SEQ ID NO: 7275 - DNA, 42 bp, synthetic construct; identical to SEQ ID NO: 3378
  misc_feature 1..42: note = Synthetic construct
  source 1..42: mol_type = other DNA

SEQ ID NO: 7276 - DNA, 33 bp, synthetic construct; identical to SEQ ID NO: 3379
  misc_feature 1..33: note = Synthetic construct
  source 1..33: mol_type = other DNA

SEQ ID NO: 7277 - DNA, 72 bp, synthetic construct; identical to SEQ ID NO: 3380
  misc_feature 1..72: note = Synthetic construct
  source 1..72: mol_type = other DNA

SEQ ID NO: 7278 - DNA, 60 bp, synthetic construct; identical to SEQ ID NO: 3381
  misc_feature 1..60: note = Synthetic construct
  source 1..60: mol_type = other DNA

SEQ ID NO: 7279 - DNA, 42 bp, synthetic construct; identical to SEQ ID NO: 3382
  misc_feature 1..42: note = Synthetic construct
  source 1..42: mol_type = other DNA

SEQ ID NO: 7280 - DNA, 42 bp, synthetic construct; identical to SEQ ID NO: 3383
  misc_feature 1..42: note = Synthetic construct
  source 1..42: mol_type = other DNA

SEQ ID NO: 7281 - DNA, 54 bp, synthetic construct; identical to SEQ ID NO: 3384
  misc_feature 1..54: note = Synthetic construct
  source 1..54: mol_type = other DNA

SEQ ID NO: 7282 - DNA, 60 bp, synthetic construct; identical to SEQ ID NO: 3385
  misc_feature 1..60: note = Synthetic construct
  source 1..60: mol_type = other DNA

SEQ ID NO: 7283 - DNA, 54 bp, synthetic construct; identical to SEQ ID NO: 3386
  misc_feature 1..54: note = Synthetic construct
  source 1..54: mol_type = other DNA

SEQ ID NO: 7284 - DNA, 75 bp, synthetic construct; identical to SEQ ID NO: 3387
  misc_feature 1..75: note = Synthetic construct
  source 1..75: mol_type = other DNA

SEQ ID NO: 7285 - DNA, 39 bp, synthetic construct; identical to SEQ ID NO: 3388
  misc_feature 1..39: note = Synthetic construct
  source 1..39: mol_type = other DNA

SEQ ID NO: 7286 - DNA, 57 bp, synthetic construct; identical to SEQ ID NO: 3389
  misc_feature 1..57: note = Synthetic construct
  source 1..57: mol_type = other DNA

SEQ ID NO: 7287 - DNA, 45 bp, synthetic construct; identical to SEQ ID NO: 3390
  misc_feature 1..45: note = Synthetic construct
  source 1..45: mol_type = other DNA

SEQ ID NO: 7288 - DNA, 48 bp, synthetic construct; identical to SEQ ID NO: 3391
  misc_feature 1..48: note = Synthetic construct
  source 1..48: mol_type = other DNA

SEQ ID NO: 7289 - DNA, 51 bp, synthetic construct; identical to SEQ ID NO: 3392
  misc_feature 1..51: note = Synthetic construct
  source 1..51: mol_type = other DNA

SEQ ID NO: 7290 - DNA, 45 bp, synthetic construct; identical to SEQ ID NO: 3393
  misc_feature 1..45: note = Synthetic construct
  source 1..45: mol_type = other DNA

SEQ ID NO: 7291 - DNA, 54 bp, synthetic construct; identical to SEQ ID NO: 3394
  misc_feature 1..54: note = Synthetic construct
  source 1..54: mol_type = other DNA

SEQ ID NO: 7292 - DNA, 48 bp, synthetic construct; identical to SEQ ID NO: 3395
  misc_feature 1..48: note = Synthetic construct
  source 1..48: mol_type = other DNA

SEQ ID NO: 7293 - DNA, 48 bp, synthetic construct; identical to SEQ ID NO: 3396
  misc_feature 1..48: note = Synthetic construct
  source 1..48: mol_type = other DNA

SEQ ID NO: 7294 - DNA, 66 bp, synthetic construct; identical to SEQ ID NO: 3397
  misc_feature 1..66: note = Synthetic construct
  source 1..66: mol_type = other DNA

SEQ ID NO: 7295 - DNA, 51 bp, synthetic construct; identical to SEQ ID NO: 3398
  misc_feature 1..51: note = Synthetic construct
  source 1..51: mol_type = other DNA

SEQ ID NO: 7296 - DNA, 51 bp, synthetic construct; identical to SEQ ID NO: 3399
  misc_feature 1..51: note = Synthetic construct
  source 1..51: mol_type = other DNA

SEQ ID NO: 7297 - DNA, 66 bp, synthetic construct; identical to SEQ ID NO: 3400
  misc_feature 1..66: note = Synthetic construct
  source 1..66: mol_type = other DNA

SEQ ID NO: 7298 - DNA, 51 bp, synthetic construct; identical to SEQ ID NO: 3401
  misc_feature 1..51: note = Synthetic construct
  source 1..51: mol_type = other DNA

SEQ ID NO: 7299 - DNA, 54 bp, synthetic construct; identical to SEQ ID NO: 3402
  misc_feature 1..54: note = Synthetic construct
  source 1..54: mol_type = other DNA

SEQ ID NO: 7300 - DNA, 60 bp, synthetic construct; identical to SEQ ID NO: 3403
  misc_feature 1..60: note = Synthetic construct
  source 1..60: mol_type = other DNA

SEQ ID NO: 7301 - DNA, 42 bp, synthetic construct; identical to SEQ ID NO: 3404
  misc_feature 1..42: note = Synthetic construct
  source 1..42: mol_type = other DNA

SEQ ID NO: 7302 - DNA, 51 bp, synthetic construct; identical to SEQ ID NO: 3405
  misc_feature 1..51: note = Synthetic construct
  source 1..51: mol_type = other DNA

SEQ ID NO: 7303 - DNA, 39 bp, synthetic construct; identical to SEQ ID NO: 3406
  misc_feature 1..39: note = Synthetic construct
  source 1..39: mol_type = other DNA

SEQ ID NO: 7304 - DNA, 48 bp, synthetic construct; identical to SEQ ID NO: 3407
  misc_feature 1..48: note = Synthetic construct
  source 1..48: mol_type = other DNA

SEQ ID NO: 7305 - DNA, 66 bp, synthetic construct; identical to SEQ ID NO: 3408
  misc_feature 1..66: note = Synthetic construct
  source 1..66: mol_type = other DNA

SEQ ID NO: 7306 - DNA, 57 bp, synthetic construct; identical to SEQ ID NO: 3409
  misc_feature 1..57: note = Synthetic construct
  source 1..57: mol_type = other DNA

SEQ ID NO: 7307 - DNA, 45 bp, synthetic construct; identical to SEQ ID NO: 3410
  misc_feature 1..45: note = Synthetic construct
  source 1..45: mol_type = other DNA

SEQ ID NO: 7308 - DNA, 63 bp, synthetic construct; identical to SEQ ID NO: 3411
  misc_feature 1..63: note = Synthetic construct
  source 1..63: mol_type = other DNA

SEQ ID NO: 7309 - DNA, 39 bp, synthetic construct; identical to SEQ ID NO: 3412
  misc_feature 1..39: note = Synthetic construct
  source 1..39: mol_type = other DNA

SEQ ID NO: 7310 - DNA, 48 bp, synthetic construct; identical to SEQ ID NO: 3413
  misc_feature 1..48: note = Synthetic construct
  source 1..48: mol_type = other DNA

SEQ ID NO: 7311 - DNA, 60 bp, synthetic construct; identical to SEQ ID NO: 3414
  misc_feature 1..60: note = Synthetic construct
  source 1..60: mol_type = other DNA

SEQ ID NO: 7312 - DNA, 60 bp, synthetic construct; identical to SEQ ID NO: 3415
  misc_feature 1..60: note = Synthetic construct
  source 1..60: mol_type = other DNA

SEQ ID NO: 7313 - DNA, 45 bp, synthetic construct; identical to SEQ ID NO: 3416
  misc_feature 1..45: note = Synthetic construct
  source 1..45: mol_type = other DNA

SEQ ID NO: 7314 - DNA, 54 bp, synthetic construct; identical to SEQ ID NO: 3417
  misc_feature 1..54: note = Synthetic construct
  source 1..54: mol_type = other DNA

SEQ ID NO: 7315 - DNA, 42 bp, synthetic construct; identical to SEQ ID NO: 3418
  misc_feature 1..42: note = Synthetic construct
  source 1..42: mol_type = other DNA

SEQ ID NO: 7316 - DNA, 63 bp, synthetic construct; identical to SEQ ID NO: 3419
  misc_feature 1..63: note = Synthetic construct
  source 1..63: mol_type = other DNA

SEQ ID NO: 7317 - DNA, 54 bp, synthetic construct; identical to SEQ ID NO: 3420
  misc_feature 1..54: note = Synthetic construct
  source 1..54: mol_type = other DNA

SEQ ID NO: 7318 - DNA, 42 bp, synthetic construct; identical to SEQ ID NO: 3421
  misc_feature 1..42: note = Synthetic construct
  source 1..42: mol_type = other DNA

SEQ ID NO: 7319 - DNA, 84 bp, synthetic construct; identical to SEQ ID NO: 3422
  misc_feature 1..84: note = Synthetic construct
  source 1..84: mol_type = other DNA

SEQ ID NO: 7320 - DNA, 57 bp, synthetic construct; identical to SEQ ID NO: 3423
  misc_feature 1..57: note = Synthetic construct
  source 1..57: mol_type = other DNA

SEQ ID NO: 7321 - DNA, 30 bp, synthetic construct; identical to SEQ ID NO: 3424
  misc_feature 1..30: note = Synthetic construct
  source 1..30: mol_type = other DNA

SEQ ID NO: 7322 - DNA, 39 bp, synthetic construct; identical to SEQ ID NO: 3425
  misc_feature 1..39: note = Synthetic construct
  source 1..39: mol_type = other DNA

SEQ ID NO: 7323 - DNA, 75 bp, synthetic construct; identical to SEQ ID NO: 3426
  misc_feature 1..75: note = Synthetic construct
  source 1..75: mol_type = other DNA

SEQ ID NO: 7324 - DNA, 36 bp, synthetic construct; identical to SEQ ID NO: 3427
  misc_feature 1..36: note = Synthetic construct
  source 1..36: mol_type = other DNA

SEQ ID NO: 7325 - DNA, 63 bp, synthetic construct; identical to SEQ ID NO: 3428
  misc_feature 1..63: note = Synthetic construct
  source 1..63: mol_type = other DNA

SEQ ID NO: 7326 - DNA, 27 bp, synthetic construct
  misc_feature 1..27: note = Synthetic construct
  source 1..27: mol_type = other DNA
tgtgcgagagacgagaacgactactgg

SEQ ID NO: 7327 - DNA, 42 bp, synthetic construct; identical to SEQ ID NO: 3430
  misc_feature 1..42: note = Synthetic construct
  source 1..42: mol_type = other DNA

SEQ ID NO: 7328 - DNA, 69 bp, synthetic construct; identical to SEQ ID NO: 3431
  misc_feature 1..69: note = Synthetic construct
  source 1..69: mol_type = other DNA

SEQ ID NO: 7329 - DNA, 27 bp, synthetic construct
  misc_feature 1..27: note = Synthetic construct
  source 1..27: mol_type = other DNA
tgtgcgagagctttcctggacgtctgg

SEQ ID NO: 7330 - DNA, 63 bp, synthetic construct; identical to SEQ ID NO: 3433
  misc_feature 1..63: note = Synthetic construct
  source 1..63: mol_type = other DNA

SEQ ID NO: 7331 - DNA, 66 bp, synthetic construct; identical to SEQ ID NO: 3434
  misc_feature 1..66: note = Synthetic construct
  source 1..66: mol_type = other DNA

SEQ ID NO: 7332 - DNA, 66 bp, synthetic construct; identical to SEQ ID NO: 3435
  misc_feature 1..66: note = Synthetic construct
  source 1..66: mol_type = other DNA

SEQ ID NO: 7333 - DNA, 48 bp, synthetic construct; identical to SEQ ID NO: 3436
  misc_feature 1..48: note = Synthetic construct
  source 1..48: mol_type = other DNA

SEQ ID NO: 7334 - DNA, 33 bp, synthetic construct; identical to SEQ ID NO: 3437
  misc_feature 1..33: note = Synthetic construct
  source 1..33: mol_type = other DNA

SEQ ID NO: 7335 - DNA, 60 bp, synthetic construct; identical to SEQ ID NO: 3438
  misc_feature 1..60: note = Synthetic construct
  source 1..60: mol_type = other DNA

SEQ ID NO: 7336 - DNA, 54 bp, synthetic construct; identical to SEQ ID NO: 3439
  misc_feature 1..54: note = Synthetic construct
  source 1..54: mol_type = other DNA

SEQ ID NO: 7337 - DNA, 66 bp, synthetic construct; identical to SEQ ID NO: 3440
  misc_feature 1..66: note = Synthetic construct
  source 1..66: mol_type = other DNA

SEQ ID NO: 7338 - DNA, 45 bp, synthetic construct; identical to SEQ ID NO: 3441
  misc_feature 1..45: note = Synthetic construct
  source 1..45: mol_type = other DNA

SEQ ID NO: 7339 - DNA, 42 bp, synthetic construct; identical to SEQ ID NO: 3442
  misc_feature 1..42: note = Synthetic construct
  source 1..42: mol_type = other DNA

SEQ ID NO: 7340 - DNA, 57 bp, synthetic construct; identical to SEQ ID NO: 3443
  misc_feature 1..57: note = Synthetic construct
  source 1..57: mol_type = other DNA

SEQ ID NO: 7341 - DNA, 66 bp, synthetic construct; identical to SEQ ID NO: 3444
  misc_feature 1..66: note = Synthetic construct
  source 1..66: mol_type = other DNA

SEQ ID NO: 7342 - DNA, 66 bp, synthetic construct; identical to SEQ ID NO: 3445
  misc_feature 1..66: note = Synthetic construct
  source 1..66: mol_type = other DNA

SEQ ID NO: 7343 - DNA, 66 bp, synthetic construct; identical to SEQ ID NO: 3446
  misc_feature 1..66: note = Synthetic construct
  source 1..66: mol_type = other DNA

SEQ ID NO: 7344 - DNA, 51 bp, synthetic construct; identical to SEQ ID NO: 3447
  misc_feature 1..51: note = Synthetic construct
  source 1..51: mol_type = other DNA

SEQ ID NO: 7345 - DNA, 45 bp, synthetic construct; identical to SEQ ID NO: 3448
  misc_feature 1..45: note = Synthetic construct
  source 1..45: mol_type = other DNA

SEQ ID NO: 7346 - DNA, 54 bp, synthetic construct; identical to SEQ ID NO: 3449
  misc_feature 1..54: note = Synthetic construct
  source 1..54: mol_type = other DNA

SEQ ID NO: 7347 - DNA, 51 bp, synthetic construct; identical to SEQ ID NO: 3450
  misc_feature 1..51: note = Synthetic construct
  source 1..51: mol_type = other DNA

SEQ ID NO: 7348 - DNA, 45 bp, synthetic construct; identical to SEQ ID NO: 3451
  misc_feature 1..45: note = Synthetic construct
  source 1..45: mol_type = other DNA

SEQ ID NO: 7349 - DNA, 69 bp, synthetic construct; identical to SEQ ID NO: 3452
  misc_feature 1..69: note = Synthetic construct
  source 1..69: mol_type = other DNA

SEQ ID NO: 7350 - DNA, 66 bp, synthetic construct; identical to SEQ ID NO: 3453
  misc_feature 1..66: note = Synthetic construct
  source 1..66: mol_type = other DNA

SEQ ID NO: 7351 - DNA, 72 bp, synthetic construct; identical to SEQ ID NO: 3454
  misc_feature 1..72: note = Synthetic construct
  source 1..72: mol_type = other DNA

SEQ ID NO: 7352 - DNA, 39 bp, synthetic construct; identical to SEQ ID NO: 3455
  misc_feature 1..39: note = Synthetic construct
  source 1..39: mol_type = other DNA

SEQ ID NO: 7353 - DNA, 48 bp, synthetic construct; identical to SEQ ID NO: 3456
  misc_feature 1..48: note = Synthetic construct
  source 1..48: mol_type = other DNA

SEQ ID NO: 7354 - DNA, 63 bp, synthetic construct; identical to SEQ ID NO: 3457
  misc_feature 1..63: note = Synthetic construct
  source 1..63: mol_type = other DNA

SEQ ID NO: 7355 - DNA, 60 bp, synthetic construct; identical to SEQ ID NO: 3458
  misc_feature 1..60: note = Synthetic construct
  source 1..60: mol_type = other DNA

SEQ ID NO: 7356 - DNA, 39 bp, synthetic construct; identical to SEQ ID NO: 3459
  misc_feature 1..39: note = Synthetic construct
  source 1..39: mol_type = other DNA

SEQ ID NO: 7357 - DNA, 78 bp, synthetic construct; identical to SEQ ID NO: 3460
  misc_feature 1..78: note = Synthetic construct
  source 1..78: mol_type = other DNA

SEQ ID NO: 7358 - DNA, 63 bp, synthetic construct; identical to SEQ ID NO: 3461
  misc_feature 1..63: note = Synthetic construct
  source 1..63: mol_type = other DNA

SEQ ID NO: 7359 - DNA, 45 bp, synthetic construct; identical to SEQ ID NO: 3462
  misc_feature 1..45: note = Synthetic construct
  source 1..45: mol_type = other DNA

SEQ ID NO: 7360 - DNA, 45 bp, synthetic construct; identical to SEQ ID NO: 3463
  misc_feature 1..45: note = Synthetic construct
  source 1..45: mol_type = other DNA

SEQ ID NO: 7361 - DNA, 45 bp, synthetic construct; identical to SEQ ID NO: 3464
  misc_feature 1..45: note = Synthetic construct
  source 1..45: mol_type = other DNA

SEQ ID NO: 7362 - DNA, 81 bp, synthetic construct; identical to SEQ ID NO: 3465
  misc_feature 1..81: note = Synthetic construct
  source 1..81: mol_type = other DNA

SEQ ID NO: 7363 - DNA, 54 bp, synthetic construct; identical to SEQ ID NO: 3466
  misc_feature 1..54: note = Synthetic construct
  source 1..54: mol_type = other DNA

SEQ ID NO: 7364 - DNA, 54 bp, synthetic construct; identical to SEQ ID NO: 3467
  misc_feature 1..54: note = Synthetic construct
  source 1..54: mol_type = other DNA

SEQ ID NO: 7365 - DNA, 45 bp, synthetic construct; identical to SEQ ID NO: 3468
  misc_feature 1..45: note = Synthetic construct
  source 1..45: mol_type = other DNA

SEQ ID NO: 7366 - DNA, 45 bp, synthetic construct; identical to SEQ ID NO: 3469
  misc_feature 1..45: note = Synthetic construct
  source 1..45: mol_type = other DNA

SEQ ID NO: 7367 - DNA, 51 bp, synthetic construct; identical to SEQ ID NO: 3470
  misc_feature 1..51: note = Synthetic construct
  source 1..51: mol_type = other DNA

SEQ ID NO: 7368 - DNA, 57 bp, synthetic construct; identical to SEQ ID NO: 3471
  misc_feature 1..57: note = Synthetic construct
  source 1..57: mol_type = other DNA

SEQ ID NO: 7369 - DNA, 51 bp, synthetic construct; identical to SEQ ID NO: 3472
  misc_feature 1..51: note = Synthetic construct
  source 1..51: mol_type = other DNA

SEQ ID NO: 7370 - DNA, 60 bp, synthetic construct; identical to SEQ ID NO: 3473
  misc_feature 1..60: note = Synthetic construct
  source 1..60: mol_type = other DNA

SEQ ID NO: 7371 - DNA, 54 bp, synthetic construct; identical to SEQ ID NO: 3474
  misc_feature 1..54: note = Synthetic construct
  source 1..54: mol_type = other DNA

SEQ ID NO: 7372 - DNA, 51 bp, synthetic construct; identical to SEQ ID NO: 3475
  misc_feature 1..51: note = Synthetic construct
  source 1..51: mol_type = other DNA

SEQ ID NO: 7373 - DNA, 48 bp, synthetic construct; identical to SEQ ID NO: 3476
  misc_feature 1..48: note = Synthetic construct
  source 1..48: mol_type = other DNA

SEQ ID NO: 7374 - DNA, 57 bp, synthetic construct; identical to SEQ ID NO: 3477
  misc_feature 1..57: note = Synthetic construct
  source 1..57: mol_type = other DNA

SEQ ID NO: 7375 - DNA, 48 bp, synthetic construct; identical to SEQ ID NO: 3478
  misc_feature 1..48: note = Synthetic construct
  source 1..48: mol_type = other DNA

SEQ ID NO: 7376 - DNA, 54 bp, synthetic construct; identical to SEQ ID NO: 3479
  misc_feature 1..54: note = Synthetic construct
  source 1..54: mol_type = other DNA

SEQ ID NO: 7377 - DNA, 54 bp, synthetic construct; identical to SEQ ID NO: 3480
  misc_feature 1..54: note = Synthetic construct
  source 1..54: mol_type = other DNA

SEQ ID NO: 7378 - DNA, 66 bp, synthetic construct; identical to SEQ ID NO: 3481
  misc_feature 1..66: note = Synthetic construct
  source 1..66: mol_type = other DNA

SEQ ID NO: 7379 - DNA, 51 bp, synthetic construct; identical to SEQ ID NO: 3482
  misc_feature 1..51: note = Synthetic construct
  source 1..51: mol_type = other DNA

SEQ ID NO: 7380 - DNA, 39 bp, synthetic construct; identical to SEQ ID NO: 3483
  misc_feature 1..39: note = Synthetic construct
  source 1..39: mol_type = other DNA

SEQ ID NO: 7381 - DNA, 84 bp, synthetic construct; identical to SEQ ID NO: 3485
  misc_feature 1..84: note = Synthetic construct
  source 1..84: mol_type = other DNA

SEQ ID NO: 7382 - DNA, 36 bp, synthetic construct; identical to SEQ ID NO: 3486
  misc_feature 1..36: note = Synthetic construct
  source 1..36: mol_type = other DNA

SEQ ID NO: 7383 - DNA, 45 bp, synthetic construct; identical to SEQ ID NO: 3487
  misc_feature 1..45: note = Synthetic construct
  source 1..45: mol_type = other DNA

SEQ ID NO: 7384 - DNA, 51 bp, synthetic construct; identical to SEQ ID NO: 3488
  misc_feature 1..51: note = Synthetic construct
  source 1..51: mol_type = other DNA

SEQ ID NO: 7385 - DNA, 60 bp, synthetic construct; identical to SEQ ID NO: 3489
  misc_feature 1..60: note = Synthetic construct
  source 1..60: mol_type = other DNA

SEQ ID NO: 7386 - DNA, 72 bp, synthetic construct; identical to SEQ ID NO: 3490
  misc_feature 1..72: note = Synthetic construct
  source 1..72: mol_type = other DNA

SEQ ID NO: 7387 - DNA, 54 bp, synthetic construct; identical to SEQ ID NO: 3491
  misc_feature 1..54: note = Synthetic construct
  source 1..54: mol_type = other DNA

SEQ ID NO: 7388 - DNA, 48 bp, synthetic construct; identical to SEQ ID NO: 3492
  misc_feature 1..48: note = Synthetic construct
  source 1..48: mol_type = other DNA

SEQ ID NO: 7389 - DNA, 51 bp, synthetic construct; identical to SEQ ID NO: 3493
  misc_feature 1..51: note = Synthetic construct
  source 1..51: mol_type = other DNA

SEQ ID NO: 7390 - DNA, 45 bp, synthetic construct; identical to SEQ ID NO: 3494
  misc_feature 1..45: note = Synthetic construct
  source 1..45: mol_type = other DNA

SEQ ID NO: 7391 - DNA, 63 bp, synthetic construct; identical to SEQ ID NO: 3495
  misc_feature 1..63: note = Synthetic construct
  source 1..63: mol_type = other DNA

SEQ ID NO: 7392 - DNA, 45 bp, synthetic construct; identical to SEQ ID NO: 3496
  misc_feature 1..45: note = Synthetic construct
  source 1..45: mol_type = other DNA

SEQ ID NO: 7393 - DNA, 51 bp, synthetic construct; identical to SEQ ID NO: 3497
  misc_feature 1..51: note = Synthetic construct
  source 1..51: mol_type = other DNA

SEQ ID NO: 7394 - DNA, 45 bp, synthetic construct; identical to SEQ ID NO: 3498
  misc_feature 1..45: note = Synthetic construct
  source 1..45: mol_type = other DNA

SEQ ID NO: 7395 - DNA, 72 bp, synthetic construct; identical to SEQ ID NO: 3499
  misc_feature 1..72: note = Synthetic construct
  source 1..72: mol_type = other DNA

SEQ ID NO: 7396 - DNA, 48 bp, synthetic construct; identical to SEQ ID NO: 3500
  misc_feature 1..48: note = Synthetic construct
  source 1..48: mol_type = other DNA

SEQ ID NO: 7397 - DNA, 21 bp, synthetic construct
  misc_feature 1..21: note = Synthetic construct
  source 1..21: mol_type = other DNA
tgtgcgaaagacctctcttgt

SEQ ID NO: 7398 - DNA, 54 bp, synthetic construct; identical to SEQ ID NO: 3503
  misc_feature 1..54: note = Synthetic construct
  source 1..54: mol_type = other DNA

SEQ ID NO: 7399 - DNA, 51 bp, synthetic construct; identical to SEQ ID NO: 3504
  misc_feature 1..51: note = Synthetic construct
  source 1..51: mol_type = other DNA

SEQ ID NO: 7400 - DNA, 63 bp, synthetic construct; identical to SEQ ID NO: 3505
  misc_feature 1..63: note = Synthetic construct
  source 1..63: mol_type = other DNA

SEQ ID NO: 7401 - DNA, 42 bp, synthetic construct; identical to SEQ ID NO: 3506
  misc_feature 1..42: note = Synthetic construct
  source 1..42: mol_type = other DNA

SEQ ID NO: 7402 - DNA, 57 bp, synthetic construct; identical to SEQ ID NO: 3507
  misc_feature 1..57: note = Synthetic construct
  source 1..57: mol_type = other DNA

SEQ ID NO: 7403 - DNA, 60 bp, synthetic construct; identical to SEQ ID NO: 3508
  misc_feature 1..60: note = Synthetic construct
  source 1..60: mol_type = other DNA

SEQ ID NO: 7404 - DNA, 48 bp, synthetic construct; identical to SEQ ID NO: 3509
  misc_feature 1..48: note = Synthetic construct
  source 1..48: mol_type = other DNA

SEQ ID NO: 7405 - DNA, 63 bp, synthetic construct; identical to SEQ ID NO: 3510
  misc_feature 1..63: note = Synthetic construct
  source 1..63: mol_type = other DNA

SEQ ID NO: 7406 - DNA, 60 bp, synthetic construct; identical to SEQ ID NO: 3511
  misc_feature 1..60: note = Synthetic construct
  source 1..60: mol_type = other DNA

SEQ ID NO: 7407 - DNA, 48 bp, synthetic construct; identical to SEQ ID NO: 3512
  misc_feature 1..48: note = Synthetic construct
  source 1..48: mol_type = other DNA

SEQ ID NO: 7408 - DNA, 42 bp, synthetic construct; identical to SEQ ID NO: 3513
  misc_feature 1..42: note = Synthetic construct
  source 1..42: mol_type = other DNA

SEQ ID NO: 7409 - DNA, 33 bp, synthetic construct; identical to SEQ ID NO: 3514
  misc_feature 1..33: note = Synthetic construct
  source 1..33: mol_type = other DNA

SEQ ID NO: 7410 - DNA, 51 bp, synthetic construct; identical to SEQ ID NO: 3515
  misc_feature 1..51: note = Synthetic construct
  source 1..51: mol_type = other DNA

SEQ ID NO: 7411 - DNA, 39 bp, synthetic construct; identical to SEQ ID NO: 3516
  misc_feature 1..39: note = Synthetic construct
  source 1..39: mol_type = other DNA

SEQ ID NO: 7412 - DNA, 57 bp, synthetic construct; identical to SEQ ID NO: 3517
  misc_feature 1..57: note = Synthetic construct
  source 1..57: mol_type = other DNA

SEQ ID NO: 7413 - DNA, 48 bp, synthetic construct; identical to SEQ ID NO: 3518
  misc_feature 1..48: note = Synthetic construct
  source 1..48: mol_type = other DNA

SEQ ID NO: 7414 - DNA, 51 bp, synthetic construct; identical to SEQ ID NO: 3519
  misc_feature 1..51: note = Synthetic construct
  source 1..51: mol_type = other DNA

SEQ ID NO: 7415 - DNA, 48 bp, synthetic construct; identical to SEQ ID NO: 3520
  misc_feature 1..48: note = Synthetic construct
  source 1..48: mol_type = other DNA

SEQ ID NO: 7416 - DNA, 57 bp, synthetic construct; identical to SEQ ID NO: 3521
  misc_feature 1..57: note = Synthetic construct
  source 1..57: mol_type = other DNA

SEQ ID NO: 7417 - DNA, 60 bp, synthetic construct; identical to SEQ ID NO: 3522
  misc_feature 1..60: note = Synthetic construct
  source 1..60: mol_type = other DNA

SEQ ID NO: 7418 - DNA, 45 bp, synthetic construct; identical to SEQ ID NO: 3523
  misc_feature 1..45: note = Synthetic construct
  source 1..45: mol_type = other DNA

SEQ ID NO: 7419 - DNA, 51 bp, synthetic construct; identical to SEQ ID NO: 3524
  misc_feature 1..51: note = Synthetic construct
  source 1..51: mol_type = other DNA

SEQ ID NO: 7420 - DNA, 48 bp, synthetic construct; identical to SEQ ID NO: 3525
  misc_feature 1..48: note = Synthetic construct
  source 1..48: mol_type = other DNA

SEQ ID NO: 7421 - DNA, 51 bp, synthetic construct; identical to SEQ ID NO: 3526
  misc_feature 1..51: note = Synthetic construct
  source 1..51: mol_type = other DNA

SEQ ID NO: 7422 - DNA, 36 bp, synthetic construct; identical to SEQ ID NO: 3527
  misc_feature 1..36: note = Synthetic construct
  source 1..36: mol_type = other DNA

SEQ ID NO: 7423 - DNA, 69 bp, synthetic construct; identical to SEQ ID NO: 3528
  misc_feature 1..69: note = Synthetic construct
  source 1..69: mol_type = other DNA

SEQ ID NO: 7424 - DNA, 48 bp, synthetic construct; identical to SEQ ID NO: 3529
  misc_feature 1..48: note = Synthetic construct
  source 1..48: mol_type = other DNA

SEQ ID NO: 7425 - DNA, 48 bp, synthetic construct; identical to SEQ ID NO: 3530
  misc_feature 1..48: note = Synthetic construct
  source 1..48: mol_type = other DNA

SEQ ID NO: 7426 - DNA, 60 bp, synthetic construct; identical to SEQ ID NO: 3531
  misc_feature 1..60: note = Synthetic construct
  source 1..60: mol_type = other DNA

SEQ ID NO: 7427 - DNA, 60 bp, synthetic construct; identical to SEQ ID NO: 3532
  misc_feature 1..60: note = Synthetic construct
  source 1..60: mol_type = other DNA

SEQ ID NO: 7428 - DNA, 48 bp, synthetic construct; identical to SEQ ID NO: 1771
  misc_feature 1..48: note = Synthetic construct
  source 1..48: mol_type = other DNA

SEQ ID NO: 7429 - DNA, 66 bp, synthetic construct; identical to SEQ ID NO: 3534
  misc_feature 1..66: note = Synthetic construct
  source 1..66: mol_type = other DNA

SEQ ID NO: 7430 - DNA, 57 bp, synthetic construct; identical to SEQ ID NO: 3535
  misc_feature 1..57: note = Synthetic construct
  source 1..57: mol_type = other DNA

SEQ ID NO: 7431 - DNA, 66 bp, synthetic construct; identical to SEQ ID NO: 3536
  misc_feature 1..66: note = Synthetic construct
  source 1..66: mol_type = other DNA

SEQ ID NO: 7432 - DNA, 72 bp, synthetic construct; identical to SEQ ID NO: 3537
  misc_feature 1..72: note = Synthetic construct
  source 1..72: mol_type = other DNA

SEQ ID NO: 7433 - DNA, 39 bp, synthetic construct; identical to SEQ ID NO: 3538
  misc_feature 1..39: note = Synthetic construct
  source 1..39: mol_type = other DNA

SEQ ID NO: 7434 - DNA, 36 bp, synthetic construct; identical to SEQ ID NO: 3539
  misc_feature 1..36: note = Synthetic construct
  source 1..36: mol_type = other DNA

SEQ ID NO: 7435 - DNA, 57 bp, synthetic construct; identical to SEQ ID NO: 3540
  misc_feature 1..57: note = Synthetic construct
  source 1..57: mol_type = other DNA

SEQ ID NO: 7436 - DNA, 69 bp, synthetic construct; identical to SEQ ID NO: 3541
  misc_feature 1..69: note = Synthetic construct
  source 1..69: mol_type = other DNA

SEQ ID NO: 7437 - DNA, 60 bp, synthetic construct; identical to SEQ ID NO: 3542
  misc_feature 1..60: note = Synthetic construct
  source 1..60: mol_type = other DNA

SEQ ID NO: 7438 - DNA, 51 bp, synthetic construct; identical to SEQ ID NO: 3543
  misc_feature 1..51: note = Synthetic construct
  source 1..51: mol_type = other DNA

SEQ ID NO: 7439 - DNA, 48 bp, synthetic construct; identical to SEQ ID NO: 3544
  misc_feature 1..48: note = Synthetic construct
  source 1..48: mol_type = other DNA

SEQ ID NO: 7440 - DNA, 30 bp, synthetic construct; identical to SEQ ID NO: 3545
  misc_feature 1..30: note = Synthetic construct
  source 1..30: mol_type = other DNA

SEQ ID NO: 7441 - DNA, 66 bp, synthetic construct; identical to SEQ ID NO: 3546
  misc_feature 1..66: note = Synthetic construct
  source 1..66: mol_type = other DNA

SEQ ID NO: 7442 - DNA, 69 bp, synthetic construct; identical to SEQ ID NO: 3547
  misc_feature 1..69: note = Synthetic construct
  source 1..69: mol_type = other DNA

SEQ ID NO: 7443 - DNA, 33 bp, synthetic construct; identical to SEQ ID NO: 3548
  misc_feature 1..33: note = Synthetic construct
  source 1..33: mol_type = other DNA

SEQ ID NO: 7444 - DNA, 60 bp, synthetic construct; identical to SEQ ID NO: 3549
  misc_feature 1..60: note = Synthetic construct
  source 1..60: mol_type = other DNA

SEQ ID NO: 7445 - DNA, 39 bp, synthetic construct; identical to SEQ ID NO: 3550
  misc_feature 1..39: note = Synthetic construct
  source 1..39: mol_type = other DNA

SEQ ID NO: 7446 - DNA, 48 bp, synthetic construct; identical to SEQ ID NO: 3551
  misc_feature 1..48: note = Synthetic construct
  source 1..48: mol_type = other DNA

SEQ ID NO: 7447 - DNA, 24 bp, synthetic construct
  misc_feature 1..24: note = Synthetic construct
  source 1..24: mol_type = other DNA
tgtgtaaaacaggctctgaatact

SEQ ID NO: 7448 - DNA, 54 bp, synthetic construct; identical to SEQ ID NO: 3553
  misc_feature 1..54: note = Synthetic construct
  source 1..54: mol_type = other DNA

SEQ ID NO: 7449 - DNA, 63 bp, synthetic construct; identical to SEQ ID NO: 3554
  misc_feature 1..63: note = Synthetic construct
  source 1..63: mol_type = other DNA

SEQ ID NO: 7450 - DNA, 39 bp, synthetic construct; identical to SEQ ID NO: 3555
  misc_feature 1..39: note = Synthetic construct
  source 1..39: mol_type = other DNA

SEQ ID NO: 7451 - DNA, 60 bp, synthetic construct; identical to SEQ ID NO: 3556
  misc_feature 1..60: note = Synthetic construct
  source 1..60: mol_type = other DNA

SEQ ID NO: 7452 - DNA, 60 bp, synthetic construct; identical to SEQ ID NO: 3557
  misc_feature 1..60: note = Synthetic construct
  source 1..60: mol_type = other DNA

SEQ ID NO: 7453 - DNA, 51 bp, synthetic construct; identical to SEQ ID NO: 3558
  misc_feature 1..51: note = Synthetic construct
  source 1..51: mol_type = other DNA

SEQ ID NO: 7454 - DNA, 39 bp, synthetic construct; identical to SEQ ID NO: 3559
  misc_feature 1..39: note = Synthetic construct
  source 1..39: mol_type = other DNA

SEQ ID NO: 7455 - DNA, 69 bp, synthetic construct; identical to SEQ ID NO: 3560
  misc_feature 1..69: note = Synthetic construct
  source 1..69: mol_type = other DNA

SEQ ID NO: 7456 - DNA, 57 bp, synthetic construct; identical to SEQ ID NO: 3561
  misc_feature 1..57: note = Synthetic construct
  source 1..57: mol_type = other DNA

SEQ ID NO: 7457 - DNA, 57 bp, synthetic construct; identical to SEQ ID NO: 3563
  misc_feature 1..57: note = Synthetic construct
  source 1..57: mol_type = other DNA

SEQ ID NO: 7458 - DNA, 57 bp, synthetic construct; identical to SEQ ID NO: 3564
  misc_feature 1..57: note = Synthetic construct
  source 1..57: mol_type = other DNA

SEQ ID NO: 7459 - DNA, 36 bp, synthetic construct; identical to SEQ ID NO: 3565
  misc_feature 1..36: note = Synthetic construct
  source 1..36: mol_type = other DNA

SEQ ID NO: 7460 - DNA, 69 bp, synthetic construct; identical to SEQ ID NO: 3566
  misc_feature 1..69: note = Synthetic construct
  source 1..69: mol_type = other DNA

SEQ ID NO: 7461 - DNA, 48 bp, synthetic construct; identical to SEQ ID NO: 3567
  misc_feature 1..48: note = Synthetic construct
  source 1..48: mol_type = other DNA

SEQ ID NO: 7462 - DNA, 48 bp, synthetic construct; identical to SEQ ID NO: 3568
  misc_feature 1..48: note = Synthetic construct
  source 1..48: mol_type = other DNA

SEQ ID NO: 7463 - DNA, 57 bp, synthetic construct; identical to SEQ ID NO: 3569
  misc_feature 1..57: note = Synthetic construct
  source 1..57: mol_type = other DNA

SEQ ID NO: 7464 - DNA, 39 bp, synthetic construct; identical to SEQ ID NO: 3570
  misc_feature 1..39: note = Synthetic construct
  source 1..39: mol_type = other DNA

SEQ ID NO: 7465 - DNA, 51 bp, synthetic construct; identical to SEQ ID NO: 3571
  misc_feature 1..51: note = Synthetic construct
  source 1..51: mol_type = other DNA

SEQ ID NO: 7466 - DNA, 42 bp, synthetic construct; identical to SEQ ID NO: 3572
  misc_feature 1..42: note = Synthetic construct
  source 1..42: mol_type = other DNA

SEQ ID NO: 7467 - DNA, 39 bp, synthetic construct; identical to SEQ ID NO: 3573
  misc_feature 1..39: note = Synthetic construct
  source 1..39: mol_type = other DNA

SEQ ID NO: 7468 - DNA, 54 bp, synthetic construct; identical to SEQ ID NO: 3574
  misc_feature 1..54: note = Synthetic construct
  source 1..54: mol_type = other DNA

SEQ ID NO: 7469 - DNA, 60 bp, synthetic construct; identical to SEQ ID NO: 3575
  misc_feature 1..60: note = Synthetic construct
  source 1..60: mol_type = other DNA

SEQ ID NO: 7470 - DNA, 57 bp, synthetic construct; identical to SEQ ID NO: 3576
  misc_feature 1..57: note = Synthetic construct
  source 1..57: mol_type = other DNA

SEQ ID NO: 7471 - DNA, 51 bp, synthetic construct; identical to SEQ ID NO: 3577
  misc_feature 1..51: note = Synthetic construct
  source 1..51: mol_type = other DNA

SEQ ID NO: 7472 - DNA, 63 bp, synthetic construct; identical to SEQ ID NO: 3578
  misc_feature 1..63: note = Synthetic construct
  source 1..63: mol_type = other DNA

SEQ ID NO: 7473 - DNA, 54 bp, synthetic construct; identical to SEQ ID NO: 3579
  misc_feature 1..54: note = Synthetic construct
  source 1..54: mol_type = other DNA

SEQ ID NO: 7474 - DNA, 60 bp, synthetic construct; identical to SEQ ID NO: 3580
  misc_feature 1..60: note = Synthetic construct
  source 1..60: mol_type = other DNA

SEQ ID NO: 7475 - DNA, 51 bp, synthetic construct; identical to SEQ ID NO: 3581
  misc_feature 1..51: note = Synthetic construct
  source 1..51: mol_type = other DNA

SEQ ID NO: 7476 - DNA, 51 bp, synthetic construct; identical to SEQ ID NO: 3582
  misc_feature 1..51: note = Synthetic construct
  source 1..51: mol_type = other DNA

SEQ ID NO: 7477 - DNA, 48 bp, synthetic construct; identical to SEQ ID NO: 3583
  misc_feature 1..48: note = Synthetic construct
  source 1..48: mol_type = other DNA

SEQ ID NO: 7478 - DNA, 48 bp, synthetic construct; identical to SEQ ID NO: 3584
  misc_feature 1..48: note = Synthetic construct
  source 1..48: mol_type = other DNA

SEQ ID NO: 7479 - DNA, 45 bp, synthetic construct; identical to SEQ ID NO: 3585
  misc_feature 1..45: note = Synthetic construct
  source 1..45: mol_type = other DNA

SEQ ID NO: 7480 - DNA, 72 bp, synthetic construct; identical to SEQ ID NO: 3586
  misc_feature 1..72: note = Synthetic construct
  source 1..72: mol_type = other DNA

SEQ ID NO: 7481 - DNA, 48 bp, synthetic construct; identical to SEQ ID NO: 3587
  misc_feature 1..48: note = Synthetic construct
  source 1..48: mol_type = other DNA

SEQ ID NO: 7482 - DNA, 45 bp, synthetic construct; identical to SEQ ID NO: 3588
  misc_feature 1..45: note = Synthetic construct
  source 1..45: mol_type = other DNA

SEQ ID NO: 7483 - DNA, 48 bp, synthetic construct; identical to SEQ ID NO: 3589
  misc_feature 1..48: note = Synthetic construct
  source 1..48: mol_type = other DNA

SEQ ID NO: 7484 - DNA, 51 bp, synthetic construct; identical to SEQ ID NO: 3590
  misc_feature 1..51: note = Synthetic construct
  source 1..51: mol_type = other DNA

SEQ ID NO: 7485 - DNA, 48 bp, synthetic construct; identical to SEQ ID NO: 3591
  misc_feature 1..48: note = Synthetic construct
  source 1..48: mol_type = other DNA

SEQ ID NO: 7486 - DNA, 63 bp, synthetic construct; identical to SEQ ID NO: 3593
  misc_feature 1..63: note = Synthetic construct
  source 1..63: mol_type = other DNA

SEQ ID NO: 7487 - DNA, 48 bp, synthetic construct; identical to SEQ ID NO: 3594
  misc_feature 1..48: note = Synthetic construct
  source 1..48: mol_type = other DNA

SEQ ID NO: 7488 - DNA, 51 bp, synthetic construct; identical to SEQ ID NO: 3595
  misc_feature 1..51: note = Synthetic construct
  source 1..51: mol_type = other DNA

SEQ ID NO: 7489 - DNA, 66 bp, synthetic construct; identical to SEQ ID NO: 3596
  misc_feature 1..66: note = Synthetic construct
  source 1..66: mol_type = other DNA

SEQ ID NO: 7490 - DNA, 60 bp, synthetic construct; identical to SEQ ID NO: 3597
  misc_feature 1..60: note = Synthetic construct
  source 1..60: mol_type = other DNA

SEQ ID NO: 7491 - DNA, 66 bp, synthetic construct; identical to SEQ ID NO: 3598
  misc_feature 1..66: note = Synthetic construct
  source 1..66: mol_type = other DNA

SEQ ID NO: 7492 - DNA, 39 bp, synthetic construct; identical to SEQ ID NO: 3599
  misc_feature 1..39: note = Synthetic construct
  source 1..39: mol_type = other DNA

SEQ ID NO: 7493 - DNA, 42 bp, synthetic construct; identical to SEQ ID NO: 3600
  misc_feature 1..42: note = Synthetic construct
  source 1..42: mol_type = other DNA

SEQ ID NO: 7494 - DNA, 63 bp, synthetic construct; identical to SEQ ID NO: 3601
  misc_feature 1..63: note = Synthetic construct
  source 1..63: mol_type = other DNA

SEQ ID NO: 7495 - DNA, 63 bp, synthetic construct; identical to SEQ ID NO: 3602
  misc_feature 1..63: note = Synthetic construct
  source 1..63: mol_type = other DNA

SEQ ID NO: 7496 - DNA, 63 bp, synthetic construct; identical to SEQ ID NO: 3603
  misc_feature 1..63: note = Synthetic construct
  source 1..63: mol_type = other DNA

SEQ ID NO: 7497 - DNA, 45 bp, synthetic construct; identical to SEQ ID NO: 3604
  misc_feature 1..45: note = Synthetic construct
  source 1..45: mol_type = other DNA

SEQ ID NO: 7498 - DNA, 60 bp, synthetic construct; identical to SEQ ID NO: 3605
  misc_feature 1..60: note = Synthetic construct
  source 1..60: mol_type = other DNA

SEQ ID NO: 7499 - DNA, 48 bp, synthetic construct; identical to SEQ ID NO: 3606
  misc_feature 1..48: note = Synthetic construct
  source 1..48: mol_type = other DNA

SEQ ID NO: 7500 - DNA, 54 bp, synthetic construct; identical to SEQ ID NO: 3607
  misc_feature 1..54: note = Synthetic construct
  source 1..54: mol_type = other DNA

SEQ ID NO: 7501 - DNA, 48 bp, synthetic construct; identical to SEQ ID NO: 3608
  misc_feature 1..48: note = Synthetic construct
  source 1..48: mol_type = other DNA

SEQ ID NO: 7502 - DNA, 33 bp, synthetic construct; identical to SEQ ID NO: 3609
  misc_feature 1..33: note = Synthetic construct
  source 1..33: mol_type = other DNA

SEQ ID NO: 7503 - DNA, 51 bp, synthetic construct; identical to SEQ ID NO: 3610
  misc_feature 1..51: note = Synthetic construct
  source 1..51: mol_type = other DNA

SEQ ID NO: 7504 - DNA, 51 bp, synthetic construct; identical to SEQ ID NO: 3611
  misc_feature 1..51: note = Synthetic construct
  source 1..51: mol_type = other DNA

SEQ ID NO: 7505 - DNA, 51 bp, synthetic construct; identical to SEQ ID NO: 3612
  misc_feature 1..51: note = Synthetic construct
  source 1..51: mol_type = other DNA

SEQ ID NO: 7506 - DNA, 48 bp, synthetic construct; identical to SEQ ID NO: 3613
  misc_feature 1..48: note = Synthetic construct
  source 1..48: mol_type = other DNA

SEQ ID NO: 7507 - DNA, 60 bp, synthetic construct; identical to SEQ ID NO: 3614
  misc_feature 1..60: note = Synthetic construct
  source 1..60: mol_type = other DNA

SEQ ID NO: 7508 - DNA, 57 bp, synthetic construct; identical to SEQ ID NO: 3615
  misc_feature 1..57: note = Synthetic construct
  source 1..57: mol_type = other DNA

SEQ ID NO: 7509 - DNA, 63 bp, synthetic construct; identical to SEQ ID NO: 3616
  misc_feature 1..63: note = Synthetic construct
  source 1..63: mol_type = other DNA

SEQ ID NO: 7510 - DNA, 45 bp, synthetic construct; identical to SEQ ID NO: 3617
  misc_feature 1..45: note = Synthetic construct
  source 1..45: mol_type = other DNA

SEQ ID NO: 7511 - DNA, 45 bp, synthetic construct; identical to SEQ ID NO: 3618
  misc_feature 1..45: note = Synthetic construct
  source 1..45: mol_type = other DNA

SEQ ID NO: 7512 - DNA, 42 bp, synthetic construct; identical to SEQ ID NO: 3619
  misc_feature 1..42: note = Synthetic construct
  source 1..42: mol_type = other DNA

SEQ ID NO: 7513 - DNA, 48 bp, synthetic construct; identical to SEQ ID NO: 3620
  misc_feature 1..48: note = Synthetic construct
  source 1..48: mol_type = other DNA

SEQ ID NO: 7514 - DNA, 42 bp, synthetic construct; identical to SEQ ID NO: 3621
  misc_feature 1..42: note = Synthetic construct
  source 1..42: mol_type = other DNA

SEQ ID NO: 7515 - DNA, 30 bp, synthetic construct; identical to SEQ ID NO: 3622
  misc_feature 1..30: note = Synthetic construct
  source 1..30: mol_type = other DNA

SEQ ID NO: 7516 - DNA, 45 bp, synthetic construct; identical to SEQ ID NO: 3623
  misc_feature 1..45: note = Synthetic construct
  source 1..45: mol_type = other DNA

SEQ ID NO: 7517 - DNA, 42 bp, synthetic construct; identical to SEQ ID NO: 3624
  misc_feature 1..42: note = Synthetic construct
  source 1..42: mol_type = other DNA

SEQ ID NO: 7518 - DNA, 39 bp, synthetic construct; identical to SEQ ID NO: 3625
  misc_feature 1..39: note = Synthetic construct
  source 1..39: mol_type = other DNA

SEQ ID NO: 7519 - DNA, 66 bp, synthetic construct; identical to SEQ ID NO: 3626
  misc_feature 1..66: note = Synthetic construct
  source 1..66: mol_type = other DNA

SEQ ID NO: 7520 - DNA, 54 bp, synthetic construct; identical to SEQ ID NO: 3627
  misc_feature 1..54: note = Synthetic construct
  source 1..54: mol_type = other DNA

SEQ ID NO: 7521 - DNA, 45 bp, synthetic construct; identical to SEQ ID NO: 3628
  misc_feature 1..45: note = Synthetic construct
  source 1..45: mol_type = other DNA

SEQ ID NO: 7522 - DNA, 42 bp, synthetic construct; identical to SEQ ID NO: 3629
  misc_feature 1..42: note = Synthetic construct
  source 1..42: mol_type = other DNA

SEQ ID NO: 7523 - DNA, 42 bp, synthetic construct; identical to SEQ ID NO: 3630
  misc_feature 1..42: note = Synthetic construct
  source 1..42: mol_type = other DNA

SEQ ID NO: 7524 - DNA, 39 bp, synthetic construct; identical to SEQ ID NO: 3631
  misc_feature 1..39: note = Synthetic construct
  source 1..39: mol_type = other DNA

SEQ ID NO: 7525 - DNA, 60 bp, synthetic construct; identical to SEQ ID NO: 3632
  misc_feature 1..60: note = Synthetic construct
  source 1..60: mol_type = other DNA

SEQ ID NO: 7526 - DNA, 42 bp, synthetic construct; identical to SEQ ID NO: 3633
  misc_feature 1..42: note = Synthetic construct
  source 1..42: mol_type = other DNA

SEQ ID NO: 7527 - DNA, 54 bp, synthetic construct; identical to SEQ ID NO: 3634
  misc_feature 1..54: note = Synthetic construct
  source 1..54: mol_type = other DNA

SEQ ID NO: 7528 - DNA, 57 bp, synthetic construct; identical to SEQ ID NO: 3635
  misc_feature 1..57: note = Synthetic construct
  source 1..57: mol_type = other DNA

SEQ ID NO: 7529 - DNA, 42 bp, synthetic construct; identical to SEQ ID NO: 3636
  misc_feature 1..42: note = Synthetic construct
  source 1..42: mol_type = other DNA

SEQ ID NO: 7530 - DNA, 60 bp, synthetic construct; identical to SEQ ID NO: 3637
  misc_feature 1..60: note = Synthetic construct
  source 1..60: mol_type = other DNA

SEQ ID NO: 7531 - DNA, 54 bp, synthetic construct; identical to SEQ ID NO: 3638
  misc_feature 1..54: note = Synthetic construct
  source 1..54: mol_type = other DNA

SEQ ID NO: 7532 - DNA, 42 bp, synthetic construct; identical to SEQ ID NO: 3639
  misc_feature 1..42: note = Synthetic construct
  source 1..42: mol_type = other DNA

SEQ ID NO: 7533 - DNA, 57 bp, synthetic construct; identical to SEQ ID NO: 3640
  misc_feature 1..57: note = Synthetic construct
  source 1..57: mol_type = other DNA

SEQ ID NO: 7534 - DNA, 36 bp, synthetic construct; identical to SEQ ID NO: 3641
  misc_feature 1..36: note = Synthetic construct
  source 1..36: mol_type = other DNA

SEQ ID NO: 7535 - DNA, 54 bp, synthetic construct; identical to SEQ ID NO: 3642
  misc_feature 1..54: note = Synthetic construct
  source 1..54: mol_type = other DNA

SEQ ID NO: 7536 - DNA, 51 bp, synthetic construct; identical to SEQ ID NO: 3643
  misc_feature 1..51: note = Synthetic construct
  source 1..51: mol_type = other DNA

SEQ ID NO: 7537 - DNA, 36 bp, synthetic construct; identical to SEQ ID NO: 3644
  misc_feature 1..36: note = Synthetic construct
  source 1..36: mol_type = other DNA

SEQ ID NO: 7538 - DNA, 63 bp, synthetic construct; identical to SEQ ID NO: 3645
  misc_feature 1..63: note = Synthetic construct
  source 1..63: mol_type = other DNA

SEQ ID NO: 7539 - DNA, 45 bp, synthetic construct; identical to SEQ ID NO: 3646
  misc_feature 1..45: note = Synthetic construct
  source 1..45: mol_type = other DNA

SEQ ID NO: 7540 - DNA, 42 bp, synthetic construct; identical to SEQ ID NO: 3647
  misc_feature 1..42: note = Synthetic construct
  source 1..42: mol_type = other DNA

SEQ ID NO: 7541 - DNA, 48 bp, synthetic construct; identical to SEQ ID NO: 3648
  misc_feature 1..48: note = Synthetic construct
  source 1..48: mol_type = other DNA

SEQ ID NO: 7542 - DNA, 60 bp, synthetic construct; identical to SEQ ID NO: 3649
  misc_feature 1..60: note = Synthetic construct
  source 1..60: mol_type = other DNA

SEQ ID NO: 7543 - DNA, 54 bp, synthetic construct; identical to SEQ ID NO: 3650
  misc_feature 1..54: note = Synthetic construct
  source 1..54: mol_type = other DNA

SEQ ID NO: 7544 - DNA, 48 bp, synthetic construct; identical to SEQ ID NO: 3651
  misc_feature 1..48: note = Synthetic construct
  source 1..48: mol_type = other DNA

SEQ ID NO: 7545 - DNA, 42 bp, synthetic construct; identical to SEQ ID NO: 3652
  misc_feature 1..42: note = Synthetic construct
  source 1..42: mol_type = other DNA

SEQ ID NO: 7546 - DNA, 42 bp, synthetic construct; identical to SEQ ID NO: 3653
  misc_feature 1..42: note = Synthetic construct
  source 1..42: mol_type = other DNA

SEQ ID NO: 7547 - DNA, 51 bp, synthetic construct; identical to SEQ ID NO: 3654
  misc_feature 1..51: note = Synthetic construct
  source 1..51: mol_type = other DNA

SEQ ID NO: 7548 - DNA, 51 bp, synthetic construct; identical to SEQ ID NO: 3655
  misc_feature 1..51: note = Synthetic construct
  source 1..51: mol_type = other DNA

SEQ ID NO: 7549 - DNA, 63 bp, synthetic construct; identical to SEQ ID NO: 3656
  misc_feature 1..63: note = Synthetic construct
  source 1..63: mol_type = other DNA

SEQ ID NO: 7550 - DNA, 57 bp, synthetic construct; identical to SEQ ID NO: 3657
  misc_feature 1..57: note = Synthetic construct
  source 1..57: mol_type = other DNA

SEQ ID NO: 7551 - DNA, 66 bp, synthetic construct; identical to SEQ ID NO: 3658
  misc_feature 1..66: note = Synthetic construct
  source 1..66: mol_type = other DNA

SEQ ID NO: 7552 - DNA, 57 bp, synthetic construct; identical to SEQ ID NO: 3659
  misc_feature 1..57: note = Synthetic construct
  source 1..57: mol_type = other DNA

SEQ ID NO: 7553 - DNA, 54 bp, synthetic construct; identical to SEQ ID NO: 3660
  misc_feature 1..54: note = Synthetic construct
  source 1..54: mol_type = other DNA

SEQ ID NO: 7554 - DNA, 54 bp, synthetic construct; identical to SEQ ID NO: 3661
  misc_feature 1..54: note = Synthetic construct
  source 1..54: mol_type = other DNA

SEQ ID NO: 7555 - DNA, 42 bp, synthetic construct; identical to SEQ ID NO: 3662
  misc_feature 1..42: note = Synthetic construct
  source 1..42: mol_type = other DNA

SEQ ID NO: 7556 - DNA, 60 bp, synthetic construct; identical to SEQ ID NO: 3663
  misc_feature 1..60: note = Synthetic construct
  source 1..60: mol_type = other DNA

SEQ ID NO: 7557 - DNA, 54 bp, synthetic construct; identical to SEQ ID NO: 3664
  misc_feature 1..54: note = Synthetic construct
  source 1..54: mol_type = other DNA

SEQ ID NO: 7558 - DNA, 69 bp, synthetic construct; identical to SEQ ID NO: 3665
  misc_feature 1..69: note = Synthetic construct
  source 1..69: mol_type = other DNA

SEQ ID NO: 7559 - DNA, 42 bp, synthetic construct; identical to SEQ ID NO: 1770
  misc_feature 1..42: note = Synthetic construct
  source 1..42: mol_type = other DNA

SEQ ID NO: 7560 - DNA, 33 bp, synthetic construct; identical to SEQ ID NO: 3667
  misc_feature 1..33: note = Synthetic construct
  source 1..33: mol_type = other DNA

SEQ ID NO: 7561 - DNA, 51 bp, synthetic construct; identical to SEQ ID NO: 3668
  misc_feature 1..51: note = Synthetic construct
  source 1..51: mol_type = other DNA

SEQ ID NO: 7562 - DNA, 36 bp, synthetic construct; identical to SEQ ID NO: 3669
  misc_feature 1..36: note = Synthetic construct
  source 1..36: mol_type = other DNA

SEQ ID NO: 7563 - DNA, 54 bp, synthetic construct; identical to SEQ ID NO: 3670
  misc_feature 1..54: note = Synthetic construct
  source 1..54: mol_type = other DNA

SEQ ID NO: 7564 - DNA, 51 bp, synthetic construct; identical to SEQ ID NO: 3671
  misc_feature 1..51: note = Synthetic construct
  source 1..51: mol_type = other DNA

SEQ ID NO: 7565 - DNA, 54 bp, synthetic construct; identical to SEQ ID NO: 3672
  misc_feature 1..54: note = Synthetic construct
  source 1..54: mol_type = other DNA

SEQ ID NO: 7566 - DNA, 51 bp, synthetic construct; identical to SEQ ID NO: 3673
  misc_feature 1..51: note = Synthetic construct
  source 1..51: mol_type = other DNA

SEQ ID NO: 7567 - DNA, 45 bp, synthetic construct; identical to SEQ ID NO: 3674
  misc_feature 1..45: note = Synthetic construct
  source 1..45: mol_type = other DNA

SEQ ID NO: 7568 - DNA, 57 bp, synthetic construct; identical to SEQ ID NO: 3675
  misc_feature 1..57: note = Synthetic construct
  source 1..57: mol_type = other DNA

SEQ ID NO: 7569 - DNA, 33 bp, synthetic construct; identical to SEQ ID NO: 3676
  misc_feature 1..33: note = Synthetic construct
  source 1..33: mol_type = other DNA

SEQ ID NO: 7570 - DNA, 69 bp, synthetic construct; identical to SEQ ID NO: 3677
  misc_feature 1..69: note = Synthetic construct
  source 1..69: mol_type = other DNA

SEQ ID NO: 7571 - DNA, 66 bp, synthetic construct; identical to SEQ ID NO: 3678
  misc_feature 1..66: note = Synthetic construct
  source 1..66: mol_type = other DNA

SEQ ID NO: 7572 - DNA, 54 bp, synthetic construct; identical to SEQ ID NO: 3679
  misc_feature 1..54: note = Synthetic construct
  source 1..54: mol_type = other DNA

SEQ ID NO: 7573 - DNA, 57 bp, synthetic construct; identical to SEQ ID NO: 3680
  misc_feature 1..57: note = Synthetic construct
  source 1..57: mol_type = other DNA

SEQ ID NO: 7574 - DNA, 48 bp, synthetic construct; identical to SEQ ID NO: 3681
  misc_feature 1..48: note = Synthetic construct
  source 1..48: mol_type = other DNA

SEQ ID NO: 7575 - DNA, 54 bp, synthetic construct; identical to SEQ ID NO: 1773
  misc_feature 1..54: note = Synthetic construct
  source 1..54: mol_type = other DNA

SEQ ID NO: 7576 - DNA, 72 bp, synthetic construct; identical to SEQ ID NO: 3683
  misc_feature 1..72: note = Synthetic construct
  source 1..72: mol_type = other DNA

SEQ ID NO: 7577 - DNA, 54 bp, synthetic construct; identical to SEQ ID NO: 3684
  misc_feature 1..54: note = Synthetic construct
  source 1..54: mol_type = other DNA

SEQ ID NO: 7578 - DNA, 51 bp, synthetic construct; identical to SEQ ID NO: 3685
  misc_feature 1..51: note = Synthetic construct
  source 1..51: mol_type = other DNA

SEQ ID NO: 7579 - DNA, 45 bp, synthetic construct; identical to SEQ ID NO: 3686
  misc_feature 1..45: note = Synthetic construct
  source 1..45: mol_type = other DNA

SEQ ID NO: 7580 - DNA, 63 bp, synthetic construct; identical to SEQ ID NO: 3687
  misc_feature 1..63: note = Synthetic construct
  source 1..63: mol_type = other DNA

SEQ ID NO: 7581 - DNA, 66 bp, synthetic construct; identical to SEQ ID NO: 3688
  misc_feature 1..66: note = Synthetic construct
  source 1..66: mol_type = other DNA

SEQ ID NO: 7582 - DNA, 42 bp, synthetic construct; identical to SEQ ID NO: 3689
  misc_feature 1..42: note = Synthetic construct
  source 1..42: mol_type = other DNA

SEQ ID NO: 7583 - DNA, 39 bp, synthetic construct; identical to SEQ ID NO: 3690
  misc_feature 1..39: note = Synthetic construct
  source 1..39: mol_type = other DNA

SEQ ID NO: 7584 - DNA, 63 bp, synthetic construct; identical to SEQ ID NO: 3691
  misc_feature 1..63: note = Synthetic construct
  source 1..63: mol_type = other DNA

SEQ ID NO: 7585 - DNA, 51 bp, synthetic construct; identical to SEQ ID NO: 3692
  misc_feature 1..51: note = Synthetic construct
  source 1..51: mol_type = other DNA

SEQ ID NO: 7586 - DNA, 48 bp, synthetic construct; identical to SEQ ID NO: 3693
  misc_feature 1..48: note = Synthetic construct
  source 1..48: mol_type = other DNA

SEQ ID NO: 7587 - DNA, 42 bp, synthetic construct; identical to SEQ ID NO: 3694
  misc_feature 1..42: note = Synthetic construct
  source 1..42: mol_type = other DNA

SEQ ID NO: 7588 - DNA, 30 bp, synthetic construct
  misc_feature 1..30: note = Synthetic construct
  source 1..30: mol_type = other DNA
tgtactcgagataaaggaatgtatgactgg

SEQ ID NO: 7589 - DNA, 57 bp, synthetic construct; identical to SEQ ID NO: 1769
  misc_feature 1..57: note = Synthetic construct
  source 1..57: mol_type = other DNA

SEQ ID NO: 7590 - DNA, 36 bp, synthetic construct; identical to SEQ ID NO: 3697
  misc_feature 1..36: note = Synthetic construct
  source 1..36: mol_type = other DNA

SEQ ID NO: 7591 - DNA, 66 bp, synthetic construct; identical to SEQ ID NO: 3698
  misc_feature 1..66: note = Synthetic construct
  source 1..66: mol_type = other DNA

SEQ ID NO: 7592 - DNA, 54 bp, synthetic construct; identical to SEQ ID NO: 3699
  misc_feature 1..54: note = Synthetic construct
  source 1..54: mol_type = other DNA

SEQ ID NO: 7593 - DNA, 54 bp, synthetic construct; identical to SEQ ID NO: 3700
  misc_feature 1..54: note = Synthetic construct
  source 1..54: mol_type = other DNA

SEQ ID NO: 7594 - DNA, 42 bp, synthetic construct; identical to SEQ ID NO: 3701
  misc_feature 1..42: note = Synthetic construct
  source 1..42: mol_type = other DNA

SEQ ID NO: 7595 - DNA, 54 bp, synthetic construct; identical to SEQ ID NO: 3702
  misc_feature 1..54: note = Synthetic construct
  source 1..54: mol_type = other DNA

SEQ ID NO: 7596 - DNA, 42 bp, synthetic construct; identical to SEQ ID NO: 3703
  misc_feature 1..42: note = Synthetic construct
  source 1..42: mol_type = other DNA

SEQ ID NO: 7597 - DNA, 51 bp, synthetic construct; identical to SEQ ID NO: 3704
  misc_feature 1..51: note = Synthetic construct
  source 1..51: mol_type = other DNA

SEQ ID NO: 7598 - DNA, 63 bp, synthetic construct; identical to SEQ ID NO: 3705
  misc_feature 1..63: note = Synthetic construct
  source 1..63: mol_type = other DNA

SEQ ID NO: 7599 - DNA, 51 bp, synthetic construct; identical to SEQ ID NO: 3706
  misc_feature 1..51: note = Synthetic construct
  source 1..51: mol_type = other DNA

SEQ ID NO: 7600 - DNA, 63 bp, synthetic construct; identical to SEQ ID NO: 3707
  misc_feature 1..63: note = Synthetic construct
  source 1..63: mol_type = other DNA

SEQ ID NO: 7601 - DNA, 78 bp, synthetic construct; identical to SEQ ID NO: 3708
  misc_feature 1..78: note = Synthetic construct
  source 1..78: mol_type = other DNA

SEQ ID NO: 7602 - DNA, 69 bp, synthetic construct; identical to SEQ ID NO: 3709
  misc_feature 1..69: note = Synthetic construct
  source 1..69: mol_type = other DNA

SEQ ID NO: 7603 - DNA, 42 bp, synthetic construct; identical to SEQ ID NO: 3710
  misc_feature 1..42: note = Synthetic construct
  source 1..42: mol_type = other DNA

SEQ ID NO: 7604 - DNA, 54 bp, synthetic construct; identical to SEQ ID NO: 3711
  misc_feature 1..54: note = Synthetic construct
  source 1..54: mol_type = other DNA

SEQ ID NO: 7605 - DNA, 63 bp, synthetic construct; identical to SEQ ID NO: 3713
  misc_feature 1..63: note = Synthetic construct
  source 1..63: mol_type = other DNA

SEQ ID NO: 7606 - DNA, 42 bp, synthetic construct; identical to SEQ ID NO: 3714
  misc_feature 1..42: note = Synthetic construct
  source 1..42: mol_type = other DNA

SEQ ID NO: 7607 - DNA, 51 bp, synthetic construct; identical to SEQ ID NO: 3715
  misc_feature 1..51: note = Synthetic construct
  source 1..51: mol_type = other DNA

SEQ ID NO: 7608 - DNA, 48 bp, synthetic construct; identical to SEQ ID NO: 3716
  misc_feature 1..48: note = Synthetic construct
  source 1..48: mol_type = other DNA

SEQ ID NO: 7609 - DNA, 33 bp, synthetic construct; identical to SEQ ID NO: 3717
  misc_feature 1..33: note = Synthetic construct
  source 1..33: mol_type = other DNA

SEQ ID NO: 7610 - DNA, 45 bp, synthetic construct; identical to SEQ ID NO: 3718
  misc_feature 1..45: note = Synthetic construct
  source 1..45: mol_type = other DNA

SEQ ID NO: 7611 - DNA, 75 bp, synthetic construct; identical to SEQ ID NO: 3719
  misc_feature 1..75: note = Synthetic construct
  source 1..75: mol_type = other DNA

SEQ ID NO: 7612 - DNA, 51 bp, synthetic construct; identical to SEQ ID NO: 3720
  misc_feature 1..51: note = Synthetic construct
  source 1..51: mol_type = other DNA

SEQ ID NO: 7613 - DNA, 57 bp, synthetic construct; identical to SEQ ID NO: 3721
  misc_feature 1..57: note = Synthetic construct
  source 1..57: mol_type = other DNA

SEQ ID NO: 7614 - DNA, 48 bp, synthetic construct; identical to SEQ ID NO: 3722
  misc_feature 1..48: note = Synthetic construct
  source 1..48: mol_type = other DNA

SEQ ID NO: 7615 - DNA, 72 bp, synthetic construct; identical to SEQ ID NO: 3723
  misc_feature 1..72: note = Synthetic construct
  source 1..72: mol_type = other DNA

SEQ ID NO: 7616 - DNA, 51 bp, synthetic construct; identical to SEQ ID NO: 3724
  misc_feature 1..51: note = Synthetic construct
  source 1..51: mol_type = other DNA

SEQ ID NO: 7617 - DNA, 39 bp, synthetic construct; identical to SEQ ID NO: 3725
  misc_feature 1..39: note = Synthetic construct
  source 1..39: mol_type = other DNA

SEQ ID NO: 7618 - DNA, 42 bp, synthetic construct; identical to SEQ ID NO: 3726
  misc_feature 1..42: note = Synthetic construct
  source 1..42: mol_type = other DNA

SEQ ID NO: 7619 - DNA, 60 bp, synthetic construct; identical to SEQ ID NO: 3727
  misc_feature 1..60: note = Synthetic construct
  source 1..60: mol_type = other DNA

SEQ ID NO: 7620 - DNA, 51 bp, synthetic construct; identical to SEQ ID NO: 3728
  misc_feature 1..51: note = Synthetic construct
  source 1..51: mol_type = other DNA

SEQ ID NO: 7621 - DNA, 51 bp, synthetic construct; identical to SEQ ID NO: 3729
  misc_feature 1..51: note = Synthetic construct
  source 1..51: mol_type = other DNA

SEQ ID NO: 7622 - DNA, 57 bp, synthetic construct; identical to SEQ ID NO: 3730
  misc_feature 1..57: note = Synthetic construct
  source 1..57: mol_type = other DNA

SEQ ID NO: 7623 - DNA, 39 bp, synthetic construct; identical to SEQ ID NO: 3731
  misc_feature 1..39: note = Synthetic construct
  source 1..39: mol_type = other DNA

SEQ ID NO: 7624 - DNA, 63 bp, synthetic construct; identical to SEQ ID NO: 3732
  misc_feature 1..63: note = Synthetic construct
  source 1..63: mol_type = other DNA

SEQ ID NO: 7625 - DNA, 54 bp, synthetic construct; identical to SEQ ID NO: 3733
  misc_feature 1..54: note = Synthetic construct
  source 1..54: mol_type = other DNA

SEQ ID NO: 7626 - DNA, 33 bp, synthetic construct; identical to SEQ ID NO: 3734
  misc_feature 1..33: note = Synthetic construct
  source 1..33: mol_type = other DNA

SEQ ID NO: 7627 - DNA, 60 bp, synthetic construct; identical to SEQ ID NO: 3735
  misc_feature 1..60: note = Synthetic construct
  source 1..60: mol_type = other DNA

SEQ ID NO: 7628 - DNA, 51 bp, synthetic construct; identical to SEQ ID NO: 3736
  misc_feature 1..51: note = Synthetic construct
  source 1..51: mol_type = other DNA

SEQ ID NO: 7629 - DNA, 42 bp, synthetic construct; identical to SEQ ID NO: 3737
  misc_feature 1..42: note = Synthetic construct
  source 1..42: mol_type = other DNA

SEQ ID NO: 7630 - DNA, 63 bp, synthetic construct; identical to SEQ ID NO: 3738
  misc_feature 1..63: note = Synthetic construct
  source 1..63: mol_type = other DNA

SEQ ID NO: 7631 - DNA, 60 bp, synthetic construct; identical to SEQ ID NO: 3739
  misc_feature 1..60: note = Synthetic construct
  source 1..60: mol_type = other DNA

SEQ ID NO: 7632 - DNA, 60 bp, synthetic construct; identical to SEQ ID NO: 3740
  misc_feature 1..60: note = Synthetic construct
  source 1..60: mol_type = other DNA

SEQ ID NO: 7633 - DNA, 36 bp, synthetic construct; identical to SEQ ID NO: 3741
  misc_feature 1..36: note = Synthetic construct
  source 1..36: mol_type = other DNA

SEQ ID NO: 7634 - DNA, 81 bp, synthetic construct; identical to SEQ ID NO: 3742
  misc_feature 1..81: note = Synthetic construct
  source 1..81: mol_type = other DNA

SEQ ID NO: 7635 - DNA, 57 bp, synthetic construct; identical to SEQ ID NO: 3743
  misc_feature 1..57: note = Synthetic construct
  source 1..57: mol_type = other DNA

SEQ ID NO: 7636 - DNA, 66 bp, synthetic construct; identical to SEQ ID NO: 3744
  misc_feature 1..66: note = Synthetic construct
  source 1..66: mol_type = other DNA

SEQ ID NO: 7637 - DNA, 60 bp, synthetic construct; identical to SEQ ID NO: 3745
  misc_feature 1..60: note = Synthetic construct
  source 1..60: mol_type = other DNA

SEQ ID NO: 7638 - DNA, 42 bp, synthetic construct; identical to SEQ ID NO: 3746
  misc_feature 1..42: note = Synthetic construct
  source 1..42: mol_type = other DNA

SEQ ID NO: 7639 - DNA, 48 bp, synthetic construct; identical to SEQ ID NO: 3747
  misc_feature 1..48: note = Synthetic construct
  source 1..48: mol_type = other DNA

SEQ ID NO: 7640 - DNA, 69 bp, synthetic construct; identical to SEQ ID NO: 3748
  misc_feature 1..69: note = Synthetic construct
  source 1..69: mol_type = other DNA

SEQ ID NO: 7641 - DNA, 42 bp, synthetic construct; identical to SEQ ID NO: 3749
  misc_feature 1..42: note = Synthetic construct
  source 1..42: mol_type = other DNA

SEQ ID NO: 7642 - DNA, 60 bp, synthetic construct; identical to SEQ ID NO: 3750
  misc_feature 1..60: note = Synthetic construct
  source 1..60: mol_type = other DNA

SEQ ID NO: 7643 - DNA, 57 bp, synthetic construct; identical to SEQ ID NO: 3751
  misc_feature 1..57: note = Synthetic construct
  source 1..57: mol_type = other DNA

SEQ ID NO: 7644 - DNA, 45 bp, synthetic construct; identical to SEQ ID NO: 3752
  misc_feature 1..45: note = Synthetic construct
  source 1..45: mol_type = other DNA

SEQ ID NO: 7645 - DNA, 42 bp, synthetic construct; identical to SEQ ID NO: 3753
  misc_feature 1..42: note = Synthetic construct
  source 1..42: mol_type = other DNA

SEQ ID NO: 7646 - DNA, 51 bp, synthetic construct; identical to SEQ ID NO: 3754
  misc_feature 1..51: note = Synthetic construct
  source 1..51: mol_type = other DNA

SEQ ID NO: 7647 - DNA, 45 bp, synthetic construct; identical to SEQ ID NO: 3755
  misc_feature 1..45: note = Synthetic construct
  source 1..45: mol_type = other DNA

SEQ ID NO: 7648 - DNA, 63 bp, synthetic construct; identical to SEQ ID NO: 3756
  misc_feature 1..63: note = Synthetic construct
  source 1..63: mol_type = other DNA

SEQ ID NO: 7649 - DNA, 39 bp, synthetic construct; identical to SEQ ID NO: 3757
  misc_feature 1..39: note = Synthetic construct
  source 1..39: mol_type = other DNA

SEQ ID NO: 7650 - DNA, 42 bp, synthetic construct; identical to SEQ ID NO: 3758
  misc_feature 1..42: note = Synthetic construct
  source 1..42: mol_type = other DNA

SEQ ID NO: 7651 - DNA, 72 bp, synthetic construct; identical to SEQ ID NO: 3759
  misc_feature 1..72: note = Synthetic construct
  source 1..72: mol_type = other DNA

SEQ ID NO: 7652 - DNA, 54 bp, synthetic construct; identical to SEQ ID NO: 3760
  misc_feature 1..54: note = Synthetic construct
  source 1..54: mol_type = other DNA

SEQ ID NO: 7653 - DNA, 57 bp, synthetic construct; identical to SEQ ID NO: 3761
  misc_feature 1..57: note = Synthetic construct
  source 1..57: mol_type = other DNA

SEQ ID NO: 7654 - DNA, 66 bp, synthetic construct; identical to SEQ ID NO: 3762
  misc_feature 1..66: note = Synthetic construct
  source 1..66: mol_type = other DNA

SEQ ID NO: 7655 - DNA, 48 bp, synthetic construct; identical to SEQ ID NO: 3763
  misc_feature 1..48: note = Synthetic construct
  source 1..48: mol_type = other DNA

SEQ ID NO: 7656 - DNA, 51 bp, synthetic construct; identical to SEQ ID NO: 3764
  misc_feature 1..51: note = Synthetic construct
  source 1..51: mol_type = other DNA

SEQ ID NO: 7657 - DNA, 51 bp, synthetic construct; identical to SEQ ID NO: 3765
  misc_feature 1..51: note = Synthetic construct
  source 1..51: mol_type = other DNA

SEQ ID NO: 7658 - DNA, 51 bp, synthetic construct; identical to SEQ ID NO: 3766
  misc_feature 1..51: note = Synthetic construct
  source 1..51: mol_type = other DNA

SEQ ID NO: 7659 - DNA, 66 bp, synthetic construct; identical to SEQ ID NO: 3767
  misc_feature 1..66: note = Synthetic construct
  source 1..66: mol_type = other DNA

SEQ ID NO: 7660 - DNA, 69 bp, synthetic construct; identical to SEQ ID NO: 3768
  misc_feature 1..69: note = Synthetic construct
  source 1..69: mol_type = other DNA

SEQ ID NO: 7661 - DNA, 51 bp, synthetic construct; identical to SEQ ID NO: 3770
  misc_feature 1..51: note = Synthetic construct
  source 1..51: mol_type = other DNA

SEQ ID NO: 7662 - DNA, 60 bp, synthetic construct; identical to SEQ ID NO: 3771
  misc_feature 1..60: note = Synthetic construct
  source 1..60: mol_type = other DNA

SEQ ID NO: 7663 - DNA, 54 bp, synthetic construct; identical to SEQ ID NO: 3772
  misc_feature 1..54: note = Synthetic construct
  source 1..54: mol_type = other DNA

SEQ ID NO: 7664 - DNA, 57 bp, synthetic construct; identical to SEQ ID NO: 3773
  misc_feature 1..57: note = Synthetic construct
  source 1..57: mol_type = other DNA

SEQ ID NO: 7665 - DNA, 69 bp, synthetic construct; identical to SEQ ID NO: 3774
  misc_feature 1..69: note = Synthetic construct
  source 1..69: mol_type = other DNA

SEQ ID NO: 7666 - DNA, 63 bp, synthetic construct; identical to SEQ ID NO: 3775
  misc_feature 1..63: note = Synthetic construct
  source 1..63: mol_type = other DNA

SEQ ID NO: 7667 - DNA, 60 bp, synthetic construct; identical to SEQ ID NO: 3776
  misc_feature 1..60: note = Synthetic construct
  source 1..60: mol_type = other DNA

SEQ ID NO: 7668 - DNA, 57 bp, synthetic construct; identical to SEQ ID NO: 3777
  misc_feature 1..57: note = Synthetic construct
  source 1..57: mol_type = other DNA

SEQ ID NO: 7669 - DNA, 48 bp, synthetic construct; identical to SEQ ID NO: 3778
  misc_feature 1..48: note = Synthetic construct
  source 1..48: mol_type = other DNA

SEQ ID NO: 7670 - DNA, 63 bp, synthetic construct; identical to SEQ ID NO: 3779
  misc_feature 1..63: note = Synthetic construct
  source 1..63: mol_type = other DNA

SEQ ID NO: 7671 - DNA, 84 bp, synthetic construct; identical to SEQ ID NO: 3780
  misc_feature 1..84: note = Synthetic construct
  source 1..84: mol_type = other DNA

SEQ ID NO: 7672 - DNA, 48 bp, synthetic construct; identical to SEQ ID NO: 3781
  misc_feature 1..48: note = Synthetic construct
  source 1..48: mol_type = other DNA

SEQ ID NO: 7673 - DNA, 39 bp, synthetic construct; identical to SEQ ID NO: 3782
  misc_feature 1..39: note = Synthetic construct
  source 1..39: mol_type = other DNA

SEQ ID NO: 7674 - DNA, 72 bp, synthetic construct; identical to SEQ ID NO: 3783
  misc_feature 1..72: note = Synthetic construct
  source 1..72: mol_type = other DNA

SEQ ID NO: 7675 - DNA, 66 bp, synthetic construct; identical to SEQ ID NO: 3784
  misc_feature 1..66: note = Synthetic construct
  source 1..66: mol_type = other DNA

SEQ ID NO: 7676 - DNA, 45 bp, synthetic construct; identical to SEQ ID NO: 3785
  misc_feature 1..45: note = Synthetic construct
  source 1..45: mol_type = other DNA

SEQ ID NO: 7677 - DNA, 48 bp, synthetic construct; identical to SEQ ID NO: 3786
  misc_feature 1..48: note = Synthetic construct
  source 1..48: mol_type = other DNA

SEQ ID NO: 7678 - DNA, 66 bp, synthetic construct; identical to SEQ ID NO: 3787
  misc_feature 1..66: note = Synthetic construct
  source 1..66: mol_type = other DNA

SEQ ID NO: 7679 - DNA, 51 bp, synthetic construct; identical to SEQ ID NO: 3788
  misc_feature 1..51: note = Synthetic construct
  source 1..51: mol_type = other DNA

SEQ ID NO: 7680 - DNA, 57 bp, synthetic construct; identical to SEQ ID NO: 3789
  misc_feature 1..57: note = Synthetic construct
  source 1..57: mol_type = other DNA

SEQ ID NO: 7681 - DNA, 51 bp, synthetic construct; identical to SEQ ID NO: 3790
  misc_feature 1..51: note = Synthetic construct
  source 1..51: mol_type = other DNA

SEQ ID NO: 7682 - DNA, 54 bp, synthetic construct; identical to SEQ ID NO: 3791
  misc_feature 1..54: note = Synthetic construct
  source 1..54: mol_type = other DNA

SEQ ID NO: 7683 - DNA, 42 bp, synthetic construct; identical to SEQ ID NO: 3792
  misc_feature 1..42: note = Synthetic construct
  source 1..42: mol_type = other DNA

SEQ ID NO: 7684 - DNA, 69 bp, synthetic construct; identical to SEQ ID NO: 3793
  misc_feature 1..69: note = Synthetic construct
  source 1..69: mol_type = other DNA

SEQ ID NO: 7685 - DNA, 63 bp, synthetic construct; identical to SEQ ID NO: 3794
  misc_feature 1..63: note = Synthetic construct
  source 1..63: mol_type = other DNA

SEQ ID NO: 7686 - DNA, 45 bp, synthetic construct; identical to SEQ ID NO: 3795
  misc_feature 1..45: note = Synthetic construct
  source 1..45: mol_type = other DNA

SEQ ID NO: 7687 - DNA, 60 bp, synthetic construct; identical to SEQ ID NO: 3796
  misc_feature 1..60: note = Synthetic construct
  source 1..60: mol_type = other DNA

SEQ ID NO: 7688 - DNA, 45 bp, synthetic construct; identical to SEQ ID NO: 3797
  misc_feature 1..45: note = Synthetic construct
  source 1..45: mol_type = other DNA

SEQ ID NO: 7689 - DNA, 57 bp, synthetic construct; identical to SEQ ID NO: 3798
  misc_feature 1..57: note = Synthetic construct
  source 1..57: mol_type = other DNA

SEQ ID NO: 7690 - DNA, 36 bp, synthetic construct; identical to SEQ ID NO: 3799
  misc_feature 1..36: note = Synthetic construct
  source 1..36: mol_type = other DNA

SEQ ID NO: 7691 - DNA, 60 bp, synthetic construct; identical to SEQ ID NO: 3800
  misc_feature 1..60: note = Synthetic construct
  source 1..60: mol_type = other DNA

SEQ ID NO: 7692 - DNA, 48 bp, synthetic construct; identical to SEQ ID NO: 3801
  misc_feature 1..48: note = Synthetic construct
  source 1..48: mol_type = other DNA

SEQ ID NO: 7693 - DNA, 51 bp, synthetic construct; identical to SEQ ID NO: 3802
  misc_feature 1..51: note = Synthetic construct
  source 1..51: mol_type = other DNA

SEQ ID NO: 7694 - DNA, 36 bp, synthetic construct; identical to SEQ ID NO: 3803
  misc_feature 1..36: note = Synthetic construct
  source 1..36: mol_type = other DNA

SEQ ID NO: 7695 - DNA, 63 bp, synthetic construct; identical to SEQ ID NO: 3804
  misc_feature 1..63: note = Synthetic construct
  source 1..63: mol_type = other DNA

SEQ ID NO: 7696 - DNA, 39 bp, synthetic construct; identical to SEQ ID NO: 3805
  misc_feature 1..39: note = Synthetic construct
  source 1..39: mol_type = other DNA

SEQ ID NO: 7697 - DNA, 57 bp, synthetic construct; identical to SEQ ID NO: 3806
  misc_feature 1..57: note = Synthetic construct
  source 1..57: mol_type = other DNA

SEQ ID NO: 7698 - DNA, 48 bp, synthetic construct; identical to SEQ ID NO: 3807
  misc_feature 1..48: note = Synthetic construct
  source 1..48: mol_type = other DNA

SEQ ID NO: 7699 - DNA, 39 bp, synthetic construct; identical to SEQ ID NO: 3808
  misc_feature 1..39: note = Synthetic construct
  source 1..39: mol_type = other DNA

SEQ ID NO: 7700 - DNA, 54 bp, synthetic construct; identical to SEQ ID NO: 3809
  misc_feature 1..54: note = Synthetic construct
  source 1..54: mol_type = other DNA

SEQ ID NO: 7701 - DNA, 42 bp, synthetic construct; identical to SEQ ID NO: 3810
  misc_feature 1..42: note = Synthetic construct
  source 1..42: mol_type = other DNA

SEQ ID NO: 7702 - DNA, 48 bp, synthetic construct; identical to SEQ ID NO: 3811
  misc_feature 1..48: note = Synthetic construct
  source 1..48: mol_type = other DNA

SEQ ID NO: 7703 - DNA, 63 bp, synthetic construct; identical to SEQ ID NO: 3812
  misc_feature 1..63: note = Synthetic construct
  source 1..63: mol_type = other DNA

SEQ ID NO: 7704 - DNA, 42 bp, synthetic construct; identical to SEQ ID NO: 3813
  misc_feature 1..42: note = Synthetic construct
  source 1..42: mol_type = other DNA

SEQ ID NO: 7705 - DNA, 54 bp, synthetic construct; identical to SEQ ID NO: 3814
  misc_feature 1..54: note = Synthetic construct
  source 1..54: mol_type = other DNA

SEQ ID NO: 7706 - DNA, 48 bp, synthetic construct; identical to SEQ ID NO: 3815
  misc_feature 1..48: note = Synthetic construct
  source 1..48: mol_type = other DNA

SEQ ID NO: 7707 - DNA, 51 bp, synthetic construct; identical to SEQ ID NO: 3816
  misc_feature 1..51: note = Synthetic construct
  source 1..51: mol_type = other DNA

SEQ ID NO: 7708 - DNA, 69 bp, synthetic construct; identical to SEQ ID NO: 3817
  misc_feature 1..69: note = Synthetic construct
  source 1..69: mol_type = other DNA

SEQ ID NO: 7709 - DNA, 51 bp, synthetic construct; identical to SEQ ID NO: 3818
  misc_feature 1..51: note = Synthetic construct
  source 1..51: mol_type = other DNA

SEQ ID NO: 7710 - DNA, 69 bp, synthetic construct; identical to SEQ ID NO: 3819
  misc_feature 1..69: note = Synthetic construct
  source 1..69: mol_type = other DNA

SEQ ID NO: 7711 - DNA, 66 bp, synthetic construct; identical to SEQ ID NO: 3820
  misc_feature 1..66: note = Synthetic construct
  source 1..66: mol_type = other DNA

SEQ ID NO: 7712 - DNA, 54 bp, synthetic construct; identical to SEQ ID NO: 3821
  misc_feature 1..54: note = Synthetic construct
  source 1..54: mol_type = other DNA

SEQ ID NO: 7713 - DNA, 57 bp, synthetic construct; identical to SEQ ID NO: 3822
  misc_feature 1..57: note = Synthetic construct
  source 1..57: mol_type = other DNA

SEQ ID NO: 7714 - DNA, 51 bp, synthetic construct; identical to SEQ ID NO: 3823
  misc_feature 1..51: note = Synthetic construct
  source 1..51: mol_type = other DNA

SEQ ID NO: 7715 - DNA, 42 bp, synthetic construct; identical to SEQ ID NO: 3824
  misc_feature 1..42: note = Synthetic construct
  source 1..42: mol_type = other DNA

SEQ ID NO: 7716 - DNA, 51 bp, synthetic construct; identical to SEQ ID NO: 3825
  misc_feature 1..51: note = Synthetic construct
  source 1..51: mol_type = other DNA

SEQ ID NO: 7717 - DNA, 48 bp, synthetic construct; identical to SEQ ID NO: 3826
  misc_feature 1..48: note = Synthetic construct
  source 1..48: mol_type = other DNA

SEQ ID NO: 7718 - DNA, 48 bp, synthetic construct; identical to SEQ ID NO: 3828
  misc_feature 1..48: note = Synthetic construct
  source 1..48: mol_type = other DNA

SEQ ID NO: 7719 - DNA, 24 bp, synthetic construct
  misc_feature 1..24: note = Synthetic construct
  source 1..24: mol_type = other DNA
tgtacgagaagtgatagacactgg

SEQ ID NO: 7720 - DNA, 60 bp, synthetic construct; identical to SEQ ID NO: 3830
  misc_feature 1..60: note = Synthetic construct
  source 1..60: mol_type = other DNA

SEQ ID NO: 7721 - DNA, 48 bp, synthetic construct; identical to SEQ ID NO: 3831
  misc_feature 1..48: note = Synthetic construct
  source 1..48: mol_type = other DNA

SEQ ID NO: 7722 - DNA, 75 bp, synthetic construct; identical to SEQ ID NO: 3832
  misc_feature 1..75: note = Synthetic construct
  source 1..75: mol_type = other DNA

SEQ ID NO: 7723 - DNA, 45 bp, synthetic construct; identical to SEQ ID NO: 3833
  misc_feature 1..45: note = Synthetic construct
  source 1..45: mol_type = other DNA

SEQ ID NO: 7724 - DNA, 60 bp, synthetic construct; identical to SEQ ID NO: 3834
  misc_feature 1..60: note = Synthetic construct
  source 1..60: mol_type = other DNA

SEQ ID NO: 7725 - DNA, 69 bp, synthetic construct; identical to SEQ ID NO: 3835
  misc_feature 1..69: note = Synthetic construct
  source 1..69: mol_type = other DNA

SEQ ID NO: 7726 - DNA, 54 bp, synthetic construct; identical to SEQ ID NO: 3836
  misc_feature 1..54: note = Synthetic construct
  source 1..54: mol_type = other DNA

SEQ ID NO: 7727 - DNA, 48 bp, synthetic construct; identical to SEQ ID NO: 3837
  misc_feature 1..48: note = Synthetic construct
  source 1..48: mol_type = other DNA

SEQ ID NO: 7728 - DNA, 57 bp, synthetic construct; identical to SEQ ID NO: 3838
  misc_feature 1..57: note = Synthetic construct
  source 1..57: mol_type = other DNA

SEQ ID NO: 7729 - DNA, 36 bp, synthetic construct; identical to SEQ ID NO: 3839
  misc_feature 1..36: note = Synthetic construct
  source 1..36: mol_type = other DNA

SEQ ID NO: 7730 - DNA, 45 bp, synthetic construct; identical to SEQ ID NO: 3840
  misc_feature 1..45: note = Synthetic construct
  source 1..45: mol_type = other DNA

SEQ ID NO: 7731 - DNA, 54 bp, synthetic construct; identical to SEQ ID NO: 3841
  misc_feature 1..54: note = Synthetic construct
  source 1..54: mol_type = other DNA

SEQ ID NO: 7732 - DNA, 63 bp, synthetic construct; identical to SEQ ID NO: 3842
  misc_feature 1..63: note = Synthetic construct
  source 1..63: mol_type = other DNA

SEQ ID NO: 7733 - DNA, 51 bp, synthetic construct; identical to SEQ ID NO: 3843
  misc_feature 1..51: note = Synthetic construct
  source 1..51: mol_type = other DNA

SEQ ID NO: 7734 - DNA, 51 bp, synthetic construct; identical to SEQ ID NO: 3844
  misc_feature 1..51: note = Synthetic construct
  source 1..51: mol_type = other DNA

SEQ ID NO: 7735 - DNA, 51 bp, synthetic construct; identical to SEQ ID NO: 3845
  misc_feature 1..51: note = Synthetic construct
  source 1..51: mol_type = other DNA

SEQ ID NO: 7736 - DNA, 63 bp, synthetic construct; identical to SEQ ID NO: 3846
  misc_feature 1..63: note = Synthetic construct
  source 1..63: mol_type = other DNA

SEQ ID NO: 7737 - DNA, 63 bp, synthetic construct; identical to SEQ ID NO: 3847
  misc_feature 1..63: note = Synthetic construct
  source 1..63: mol_type = other DNA

SEQ ID NO: 7738 - DNA, 42 bp, synthetic construct; identical to SEQ ID NO: 3848
  misc_feature 1..42: note = Synthetic construct
  source 1..42: mol_type = other DNA

SEQ ID NO: 7739 - DNA, 69 bp, synthetic construct; identical to SEQ ID NO: 3849
  misc_feature 1..69: note = Synthetic construct
  source 1..69: mol_type = other DNA

SEQ ID NO: 7740 - DNA, 48 bp, synthetic construct; identical to SEQ ID NO: 3850
  misc_feature 1..48: note = Synthetic construct
  source 1..48: mol_type = other DNA

SEQ ID NO: 7741 - DNA, 45 bp, synthetic construct; identical to SEQ ID NO: 3851
  misc_feature 1..45: note = Synthetic construct
  source 1..45: mol_type = other DNA

SEQ ID NO: 7742 - DNA, 66 bp, synthetic construct; identical to SEQ ID NO: 3852
  misc_feature 1..66: note = Synthetic construct
  source 1..66: mol_type = other DNA

SEQ ID NO: 7743 - DNA, 57 bp, synthetic construct; identical to SEQ ID NO: 3853
  misc_feature 1..57: note = Synthetic construct
  source 1..57: mol_type = other DNA

SEQ ID NO: 7744 - DNA, 63 bp, synthetic construct; identical to SEQ ID NO: 3854
  misc_feature 1..63: note = Synthetic construct
  source 1..63: mol_type = other DNA

SEQ ID NO: 7745 - DNA, 54 bp, synthetic construct; identical to SEQ ID NO: 3855
  misc_feature 1..54: note = Synthetic construct
  source 1..54: mol_type = other DNA

SEQ ID NO: 7746 - DNA, 45 bp, synthetic construct; identical to SEQ ID NO: 3856
  misc_feature 1..45: note = Synthetic construct
  source 1..45: mol_type = other DNA

SEQ ID NO: 7747 - DNA, 54 bp, synthetic construct; identical to SEQ ID NO: 3857
  misc_feature 1..54: note = Synthetic construct
  source 1..54: mol_type = other DNA

SEQ ID NO: 7748 - DNA, 60 bp, synthetic construct; identical to SEQ ID NO: 3858
  misc_feature 1..60: note = Synthetic construct
  source 1..60: mol_type = other DNA

SEQ ID NO: 7749 - DNA, 57 bp, synthetic construct; identical to SEQ ID NO: 3859
  misc_feature 1..57: note = Synthetic construct
  source 1..57: mol_type = other DNA

SEQ ID NO: 7750 - DNA, 48 bp, synthetic construct; identical to SEQ ID NO: 3860
  misc_feature 1..48: note = Synthetic construct
  source 1..48: mol_type = other DNA

SEQ ID NO: 7751 - DNA, 48 bp, synthetic construct; identical to SEQ ID NO: 3861
  misc_feature 1..48: note = Synthetic construct
  source 1..48: mol_type = other DNA

SEQ ID NO: 7752 - DNA, 39 bp, synthetic construct; identical to SEQ ID NO: 3862
  misc_feature 1..39: note = Synthetic construct
  source 1..39: mol_type = other DNA

SEQ ID NO: 7753 - DNA, 72 bp, synthetic construct; identical to SEQ ID NO: 3863
  misc_feature 1..72: note = Synthetic construct
  source 1..72: mol_type = other DNA

SEQ ID NO: 7754 - DNA, 60 bp, synthetic construct; identical to SEQ ID NO: 3864
  misc_feature 1..60: note = Synthetic construct
  source 1..60: mol_type = other DNA

SEQ ID NO: 7755 - DNA, 54 bp, synthetic construct; identical to SEQ ID NO: 3865
  misc_feature 1..54: note = Synthetic construct
  source 1..54: mol_type = other DNA

SEQ ID NO: 7756 - DNA, 42 bp, synthetic construct; identical to SEQ ID NO: 3866
  misc_feature 1..42: note = Synthetic construct
  source 1..42: mol_type = other DNA

SEQ ID NO: 7757 - DNA, 51 bp, synthetic construct; identical to SEQ ID NO: 3867
  misc_feature 1..51: note = Synthetic construct
  source 1..51: mol_type = other DNA

SEQ ID NO: 7758 - DNA, 54 bp, synthetic construct; identical to SEQ ID NO: 3868
  misc_feature 1..54: note = Synthetic construct
  source 1..54: mol_type = other DNA

SEQ ID NO: 7759 - DNA, 39 bp, synthetic construct; identical to SEQ ID NO: 3869
  misc_feature 1..39: note = Synthetic construct
  source 1..39: mol_type = other DNA

SEQ ID NO: 7760 - DNA, 51 bp, synthetic construct; identical to SEQ ID NO: 3870
  misc_feature 1..51: note = Synthetic construct
  source 1..51: mol_type = other DNA

SEQ ID NO: 7761 - DNA, 66 bp, synthetic construct; identical to SEQ ID NO: 1774
  misc_feature 1..66: note = Synthetic construct
  source 1..66: mol_type = other DNA

SEQ ID NO: 7762 - DNA, 57 bp, synthetic construct; identical to SEQ ID NO: 3872
  misc_feature 1..57: note = Synthetic construct
  source 1..57: mol_type = other DNA

SEQ ID NO: 7763 - DNA, 54 bp, synthetic construct; identical to SEQ ID NO: 3873
  misc_feature 1..54: note = Synthetic construct
  source 1..54: mol_type = other DNA

SEQ ID NO: 7764 - DNA, 51 bp, synthetic construct; identical to SEQ ID NO: 3874
  misc_feature 1..51: note = Synthetic construct
  source 1..51: mol_type = other DNA

SEQ ID NO: 7765 - DNA, 57 bp, synthetic construct; identical to SEQ ID NO: 3875
  misc_feature 1..57: note = Synthetic construct
  source 1..57: mol_type = other DNA

SEQ ID NO: 7766 - DNA, 51 bp, synthetic construct; identical to SEQ ID NO: 3876
  misc_feature 1..51: note = Synthetic construct
  source 1..51: mol_type = other DNA

SEQ ID NO: 7767 - DNA, 45 bp, synthetic construct; identical to SEQ ID NO: 3877
  misc_feature 1..45: note = Synthetic construct
  source 1..45: mol_type = other DNA

SEQ ID NO: 7768 - DNA, 51 bp, synthetic construct; identical to SEQ ID NO: 3878
  misc_feature 1..51: note = Synthetic construct
  source 1..51: mol_type = other DNA

SEQ ID NO: 7769 - DNA, 51 bp, synthetic construct; identical to SEQ ID NO: 3879
  misc_feature 1..51: note = Synthetic construct
  source 1..51: mol_type = other DNA

SEQ ID NO: 7770 - DNA, 48 bp, synthetic construct; identical to SEQ ID NO: 3880
  misc_feature 1..48: note = Synthetic construct
  source 1..48: mol_type = other DNA

SEQ ID NO: 7771 - DNA, 328 bp, synthetic construct
  misc_feature 1..328: note = Synthetic construct
  source 1..328: mol_type = other DNA
gaaattgtgttgacgcagtctccagacaccctgtctttgtttccaggggaaagagccaccctctcctgcagggccagtcagagtgttagcagcaggtacttagcctggtaccagcagaaacctggccaggctcccaggctcctcatctatggtgcatccagtagggccactggcaccccagacaggttcagtggcagtgggtctgggacagacttcactctcaccatcagcagactggagcctgaagattttgcagtgtattactgtcagcagtatggtaggtcaccccagatcaccttcggccaagggacacgactggaaagtaaac

SEQ ID NO: 7772 - DNA, 322 bp, synthetic construct
  misc_feature 1..322: note = Synthetic construct
  source 1..322: mol_type = other DNA
gacatccagatgacccagtctccttccaccctgtctgcttctgttggagacagagtcatcattacttgccgggccagtgagggtataagtaactacttggcctggtatcagcaaaaaccagggaaagcccctaacctcctcatctataaggcgtctactttagagaatggggtcccctcacggttcagcggcagtggatttgggacagaattcactctcgccatcagcagcctgcaccctgatgattttgcaacttattactgccaacaatataagagtttttcttatacttttggccaggggaccaagctggacatgaaac

SEQ ID NO: 7773 - DNA, 334 bp, synthetic construct
  misc_feature 1..334: note = Synthetic construct
  source 1..334: mol_type = other DNA
cagtctgccctgactcagcctgcctccgtgtctgggtctcctggacagtcgatcaccatctcctgcactggaaccagcagtgacgttggtggttataactatgtctcctggttccaacatcacccaggcaaagcccccaaactcataatttatgaggtcagtaatcggccctcgggggtttctagtcgcttctctggctccaagtctggcaacacggcctccctgaccatctctgggctccaggctgaggacgaggctgattattactgcagctcatacagaagcagcaggattctttatgtcttcggaactgggaccaaggtcaccgtcctag

SEQ ID NO: 7774 - DNA, 322 bp, synthetic construct
  misc_feature 1..322: note = Synthetic construct
  source 1..322: mol_type = other DNA
gacatccagatgacccagtctccatcctccctgtctgcatctgtcggagacagagtcaccatcacttgccgggcgagtgatgatcttgacaatcatttagcctggtatcagcagagatcagggaaagcccctaagcttctgctgtatggtgttaccagattgaaaagtggggtcccatcccgattcagtggcagtggatctgggacggattacagcctcaccatcgatagcctgcagcctgaagattttgcaacatatttctgtcagcaatatcatatgacccctccgacgttcggccaagggaccaaggtggacatcaaac

SEQ ID NO: 7775 - DNA, 322 bp, synthetic construct
  misc_feature 1..322: note = Synthetic construct
  source 1..322: mol_type = other DNA
gaaaatgtgttgacgcagtttccaggcaccctgtctttgtctccaggggaaagagccaccctctcctgcagggccagtcagggtgttcacagcaacactgtagcctggtaccagcagaaacctggccagcctcccagactcctcatctctggtgcatccagcagggccactggcgttccagataggttcagtgccagtgggtctgggacagagttcagtctcactatcagcagactggagcctgaagattttgcagtgtattactgtcagcagtttggcagctcacccactttcggccctgggaccagagtggatatcaaac

SEQ ID NO: 7776 - DNA, 331 bp, synthetic construct
  misc_feature 1..331: note = Synthetic construct
  source 1..331: mol_type = other DNA
gaaattgtgttgacgcagtctccaggcaccctgtctttgtctccaggggaaagagccaccctctcctgcagggccaggcagagtcttagcaacacctcgttagcctggtaccagcagaaacctggccaggctcccaggctcctcatctatggtgcatccaggagggccactggcgtcccagacaggttcagtggcagtgggtctgggacagagttcactctctccatcgccggactggagcctgaagattttggagtgtattactgtcagcattatggtacctcacctccgatgtacacctttggccaggggaccaacctggaaatcaaac

SEQ ID NO: 7777 - DNA, 328 bp, synthetic construct
  misc_feature 1..328: note = Synthetic construct
  source 1..328: mol_type = other DNA
caggctgtggtgactcaggagccctcactgactgtgtccccaggggggacagtcactctcacctgtggctccagcactggagctgtcaccagtggtcattatccctactggttccagcagaagcctggccaagcccccaggacactgatttatgatacaagcaacagacactcctggacacctgcccggttctcaggctccctccttgggggcgaagctgccctgaccctttcgggtgcgcagcctgaggatgaggctgactattactgcttgctctcccatagtggtgcttgggtgttcggcggagggaccacgctgaccgtcctag

SEQ ID NO: 7778 - DNA, 331 bp, synthetic construct
  misc_feature 1..331: note = Synthetic construct
  source 1..331: mol_type = other DNA
caatctgccctgactcagcctcgctcagtgtccgggtctcttggacagtcagtcaccatctcctgcactggaaccagccgtgatgttggtgttcataagtctgtcgcctggtaccaacaacaccctgataaagcccccaaggtcataatttttgaagacagtaagaggccctcaggtgtccctgatcgcttctctgcctccaggtctggcaacacggcctccctgaccatctctgggctccaggctgacgatgaggctgtctatttttgttcctcatatgcaggctcttacacttgggtgttcggcggagggaccgacctgaccgtcctgg

SEQ ID NO: 7779 - DNA, 325 bp, synthetic construct
  misc_feature 1..325: note = Synthetic construct
  source 1..325: mol_type = other DNA
gaaattgtgttgacgcagtctccaggcaccctgtctgtgtctccaggggaaagagtcaccctctcctgcagggccagtcagagtgttagcagcaattacttagcctggtatcagcagacacctggccaggctcccaggctccttatatatggttcatctatcagggccactggcgtcccagacaggttcagtggcagtgggtctgggacagacttcactctcaccatcagcagactggagcctgaagattttgcagtgtattactgtcagcagtatgatggctcacctcagacgttcggccaagggaccaaggtggaaatcaaac

SEQ ID NO: 7780 - DNA, 322 bp, synthetic construct
  misc_feature 1..322: note = Synthetic construct
  source 1..322: mol_type = other DNA
gacatccagatgacccagtctccttccaccctgtctccatctgtaggagacagagtcaccatcacttgccgggccagtcagagtgttagtacctggttggcctggtatcagcagaaaccagggaaagccccgaggatcttgatctataagacgtctagtttagagagtggggtcccatcaaggttcagcggcagtggatctggaacagagttcactctcactatcagtagcctgcagcctgatgattttgcaacttattactgccaacagtatgatagttttccatacacttttggcccggggaccaagctggagatcaaac

SEQ ID NO: 7781 - DNA, 337 bp, synthetic construct
  misc_feature 1..337: note = Synthetic construct
  source 1..337: mol_type = other DNA
cagtctgccctgactcagcctgcctccgtgtctgggtctcctggacagtcgatcaccatctcctgcactggaaccagcagtgacgttggtggttataaatatgtctcctggtaccaacagcacccaggcaaagcccccaaactcataatttatgaggtcagtaatcggccctcaggggtttccaatcgcttctctggctccaagtctggcaacacggcctccctgaccatctctggcctccaggctgaagacgaggctgattactactgcagctcatatacaaacaacaacactcctcgttgggtgttcggcggagggaccaagctgaccgtcctcg

SEQ ID NO: 7782 - DNA, 340 bp, synthetic construct
  misc_feature 1..340: note = Synthetic construct
  source 1..340: mol_type = other DNA
gacatcgttatgacccagtctccagacttcctggctgtgtctctgggcgagagggccaccatcaactgcaagtccagccagagtgttttatacagctccaacaataagacctacttatcttggttccagcagaagccaggacagcctcctaagttgctcatttactgggcatctacccgggaatccggggtccccgaccgattcagtggcagcggctctgagacagatttcactctcaccatcagcggcctgcaggctgaagatgtggcagtttattactgtcagcaatattttgttcctcccctcactttcggccctgggaccaaagtgggtatcaaac

SEQ ID NO: 7783 - DNA, 325 bp, synthetic construct
  misc_feature 1..325: note = Synthetic construct
  source 1..325: mol_type = other DNA
tccgatgaattgacacagccaccctcgatgtcagtgtcactaggacaaacggccaggatcacctgctctggagatggattgccaaaacaatatgtttattggtaccaacagaagccaggccaggcccctgaattggtgatgtttaaagacaaccagaggccttcaaatatccctgagcgattctctggttccagctcagggacaatagtcacgttgaccattagtggagtccaggcagaagacgaggctgactattactgtcaatcaacagacagtagtggtgattattggctgttcggcggagggacccacctggccgtcctgg

SEQ ID NO: 7784 - DNA, 106 bp, synthetic construct
  misc_feature 1..106: note = Synthetic construct
  source 1..106: mol_type = other DNA
atctctgggctccaggctgacgacgaggctgattattactgcacctcatatacaaacaacagcaattctcaggtattcggcggagggaccaagctgaccgtcctag

SEQ ID NO: 7785 - DNA, 319 bp, synthetic construct
  misc_feature 1..319: note = Synthetic construct
  source 1..319: mol_type = other DNA
gaacttgtcttgacacagtctccagccaccctgtctttgtctccaggggaaagagccaccctctcctgcagggccagtcagactctttacacccacttagcctggtaccaacacaagcctggccaggctcccagactcctcatctatgatgcttcccacagggccactggcatcccagccaggttcagtggcagtgggtctgggacagacttcactctcaccatcaacagcctggagcctgaagattctgcagtttattactgtcagcagcgcagcaactggatcaccttcggccaagggacacgactggagattaaac

SEQ ID NO: 7786 - DNA, 334 bp, synthetic construct
  misc_feature 1..334: note = Synthetic construct
  source 1..334: mol_type = other DNA
gacatcgtgatgacccagtccccagactccctgactgtgtctctgggcgagagggccaccatcaactgcaagtccagccagaatgttttatacgacaataagaactacttaacttggtaccaacagaagccagggcagcctcctaagaaactcatttcctgggcatctacccgggaatccggggtccctgaccgattcagtggcagcgggtctgggacagatttcactctcaccatcaacagcctgcagtctgaagatgtggcagtttattactgtcagcaatattatagtactcctcccacgttcggccaagggaccaaggtggaaatcaaac

SEQ ID NO: 7787 - DNA, 325 bp, synthetic construct
  misc_feature 1..325: note = Synthetic construct
  source 1..325: mol_type = other DNA
gaaattgtgctgacgcagtctccaggcaccctgtctttgtctccaggggaaagagccaccctctcctgcagggccagtcagagtgttagcagcacctacttagcctggtaccagcagaaacctggccaggctcccacgctcctcatttatggtgcatccaccagggccactggcatccccgacaggttcagtggcagtgggtctgggacagacttcactctcaccgtcagcagactggagcctgaagattttgcagtctattactgtcagcagtatggtccctcactttgcaccttcggccaagggacacgactggagattaaac

SEQ ID NO: 7788 - DNA, 334 bp, synthetic construct
  misc_feature 1..334: note = Synthetic construct
  source 1..334: mol_type = other DNA
gctgatccttggtctcctgctcctcaggctcaccagggcccagcactgactcactggcatgtatttctccctctttgcagtgacgttggtggttataactatgtctcctggtaccaacaaaacccaggcaaagcccccaaactcatgatttatgatgtcagtaatcggccctcagggatttctaatcgcttctctggctccaagtctggcaacacggcctccctgaccatctctgggctccaggctgacgacgaggctgattattactgcacctcatatacaaacaacagcaattctcagatattcggcggagggaccaagctgaccgtcctag

SEQ ID NO: 7789 - DNA, 340 bp, synthetic construct
  misc_feature 1..340: note = Synthetic construct
  source 1..340: mol_type = other DNA
gacatcgtgatgacccagtctccagactccctggctgtgtctctgggcgagcgggccaccatctcctgcaagtccagccagagtgttttatacaggtccaagaatcagaactacttagcttggtaccagcagaaaccaggacagcctcctaaactgctcactaaatgggcttctacccgggagtccggggtccctgaccgattcagtggcagcgggtctgggacagatttcaatctcaccatcagcagcctgcaggctgaagatgtggcagtttattactgtcagcaatattatagtgctcctttcactttcggccctgggaccaaagtgggtgtcaaac

SEQ ID NO: 7790 - DNA, 334 bp, synthetic construct
  misc_feature 1..334: note = Synthetic construct
  source 1..334: mol_type = other DNA
cagtctgtgctgacgcagccgccctcagtgtctggggccccaggccagagggtcaccatctcctgcactgggagcagctccaacatcggggcaggttatgatgtacactggtaccagcagcttccaggaacagcccccaaactcctcatctatggtaacaggattcggccctcaggggtccctgaccgattctcaggctccaagtctggcacctcagcctccctggccatcagtgggctccaggctgaggatgaggctgattattactgccagtcctatgacagcaggctgactacttgggtgttcggcggagggaccaggctgaccgtcccag

SEQ ID NO: 7791 - DNA, 331 bp, synthetic construct
  misc_feature 1..331: note = Synthetic construct
  source 1..331: mol_type = other DNA
cagtctgccctgactcagcctccctccgcgtccgggtctcttggacagtcagtcaccatctcctgcactggaaccagcagtgacgtcggtggttataactatgtctcctggtaccaacaacacccaggcaaagcccccaaactcatgatttctgaggtcaataagcggccctctggggtccctgatcgcttctctggctccaagtctggcaacacggcctccctgaccgtctctgggctccaggctgaggatgaggctgattattattgcagctcatatgcaggcaacaacaattatctcttcggaactgggaccaaggtcaccgtcctag

SEQ ID NO: 7792 - DNA, 340 bp, synthetic construct
  misc_feature 1..340: note = Synthetic construct
  source 1..340: mol_type = other DNA
gacatcgtgatgacccagtctccagactccctggctgtgtctctgggcgagagggccaccatcaactgcaagtccagccagagtgttttatacacctccaacaatgagcactacttagcttggtaccagcagaaaccagggcagcctcctaagttgctcatttactgggcatctgtccgggaatccggggtccctgaccgattcagtggcgccgggtctgggacagatttcaccctcactatcagcagcctgcaggctgaagatgtggcagtttattactgtcagcaatattatacttctacgtggacgttcggccaagggaccaaggtggaagtcaaac

SEQ ID NO: 7793 - DNA, 325 bp, synthetic construct
  misc_feature 1..325: note = Synthetic construct
  source 1..325: mol_type = other DNA
tcttctgagctgactcaggaccctgctgtgtctgtggccttgggacagacagtcaagatcacatgccaaggagacagcctcagaaaccattattcaagctggttccagcagaagccaggacaggcccctgttcttgtcatctttggtgaaaacaagcggccctcagggatcccagaccgattctctgcctccaggtcaggagacacagcttccttgaccatcagtggggctcaggcggaagatgaggctgactattactgtaattcccgcgacagcagtggtgaccgttatgtcttcggctctgggaccaaggtcaccgtcctag

SEQ ID NO: 7794 - DNA, 334 bp, synthetic construct
  misc_feature 1..334: note = Synthetic construct
  source 1..334: mol_type = other DNA
aattttatactgactcagccccactctgtgtcggagtctccggggaagacggtcatcatctcctgcacccgcagcagtggcagtattggcagcaactttgtgcagtggtaccagcagcgcccgggcagtgcccccaccactgtgatctatgcagataaccaaagaccctctggggtccctgctcggttctctggctccatcgacaggtcctccaactctgcctccctcatcatctctggtctgagcactgaggacgaggctgactactattgtcactcttatgatagcgccaatccagggatattcggcggtgggaccagggtgaccgtcctca

SEQ ID NO: 7795 - DNA, 340 bp, synthetic construct
  misc_feature 1..340: note = Synthetic construct
  source 1..340: mol_type = other DNA
gacatcgtgatgacccaatctccaggctccctggctgtctctctgggcgagagggccacaataacctgcaagtccagccagagtcttttatatagcgccaccgagaggacctacctagcttggtaccagcagaagccaagacagcctcctaagttactcatcacctgggcatcgacccgggaatccggggtccctgaccgcttcagtggcagcgggtctgagacggatttcactctcaccatcagcagcctgcagcctgaggatgtggcaatttatttctgtctacaacattattctactcctcagacttttggccaggggaccaaggtggagattaacc

SEQ ID NO: 7796 - DNA, 322 bp, synthetic construct
  misc_feature 1..322: note = Synthetic construct
  source 1..322: mol_type = other DNA
gaaattgtgctgactcagtctccgggctttcagtatgtgactccaaaggagaaagtcaccgtcacctgccgggccagtcagaacatcgagactgccttacactggtaccagcacaaaccagatcagtctccaaaactgctcatcaagtatgcttcccagtccatttcaggggtcccctcgaggttcagtggcagtggatccgggacagatttcaccctcaccatcaatggcctggaacctgaagatgctgcaacgtattactgccatcagagtagtgccttaattcaaacttttggccaggggaccaagctggagatcaaac

SEQ ID NO: 7797 - DNA, 325 bp, synthetic construct
  misc_feature 1..325: note = Synthetic construct
  source 1..325: mol_type = other DNA
gaaattgtgttgacgcagtctccaggcaccctgtctttgtctccaggggaaagagccaccctctcctgcagggccagtcagcctgttaccagcggctacttagcctggtaccagcagaaacctggccaggctcccacgctcctcatctacggtgcatccacaagggccgctggcatcgcagacaggttcagtggcagtggctctgggacagacttcactctcaccatcagcagactggagcctgaagattttgcagtgtattactgtcagcactatggtagctcattgtggacgttcggccaagggtccaaggtggaaatcaaac

SEQ ID NO: 7798 - DNA, 331 bp, synthetic construct
  misc_feature 1..331: note = Synthetic construct
  source 1..331: mol_type = other DNA
gaaattgtgttgacgcagtctcctggcaccctgtctttgtctccaggggaaagagccaccctctcctgcagggccagtcggagtgttaccagcgactacttagcctggtaccagcagaaacctggccaggctcccaggctcctcatctatggtatatccaccagggccactggcatcccagacaggttcagtggcagtgggtctgggacagacttcactctcaccattaacagactggagcctgaagattctgcagtatattactgtcagcagtatggcagctcacctcccccgtacacttttggccaggggaccaagctggagatcaaac

SEQ ID NO: 7799 - DNA, 322 bp, synthetic construct
  misc_feature 1..322: note = Synthetic construct
  source 1..322: mol_type = other DNA
gaaattgtgttgacgcagtctccaggcaccctgtctttgtctccaggggaaagagccaccctctcctgcagggccagtcagagtgtgagcagcacctacttagcctggtaccagcagaaacctggccagcctcccaggctcctcatctatagtgcatccagcagggccactggcttcccagacaggttcagtggcagtgggtctgggacagacttcactctcaccatcagcagactggagcctgaagattttgcagtgtatttctgtcagcagtatggtggctcacccactttcggcggagggaccaaggtggagatcaaac

SEQ ID NO: 7800 - DNA, 325 bp, synthetic construct
  misc_feature 1..325: note = Synthetic construct
  source 1..325: mol_type = other DNA
gaaattgtgttgacgcagtctccaggcaccctgtctttgtctccaggggaaagagccaccctctcttgcagggccagtcagactgttagcagcaggtacttaagttggtatcagcagaaacgtggccaggctcccaggctcgtcatctatggtgcatcgagcagggccgctggcatcccagacaggttcagtggcagtggctctgggacagacttcactctcaccatcaccagactggagcctgacgattttgcaatgtattactgtcagcagtacggtagttcagtgtggacgttcggcccagggacccacctggagatcaacc

SEQ ID NO: 7801 - DNA, 325 bp, synthetic construct
  misc_feature 1..325: note = Synthetic construct
  source 1..325: mol_type = other DNA
tcctatgtgttgactcagccaccctcggtgtcagtggccccaggacagacggccaccattacctgtgggggatacaactttgaaactacagatgtccactggtaccagcagaggccaggccaggcccctagactggtcgtcaaagatgatagcgaccggccctcagggatccccgagcgattctcaggctccaactctgggaacacggccaccttgaccatcaccacggtcgaggtcggggatgaggccgactattattgtcaggtgtgggatagcagtagtgatcatgtggcattcggcggagggaccaagttgaccgtcctag

SEQ ID NO: 7802 - DNA, 334 bp, synthetic construct
  misc_feature 1..334: note = Synthetic construct
  source 1..334: mol_type = other DNA
cagtctgtgctgactcagccaccctcagcgtctgggacccccgggcagagggtctccatctcttgttctggagccagctccaacatcggaagtaatgttgtcaactggtaccagcagctcccaggagcggcccccaagctcctcatctatggtaacaatcagcggccctcaggggtccctgaccgattctctggctccaagtctggcacctcagcctccctggccatcagtgggctccagtctgaggatgaggctgattattactgttcagcatgggatgaaagtctgaatggtcatgtgatattcggcggggggacaaagttgaccgtcctag

SEQ ID NO: 7803 - DNA, 319 bp, synthetic construct
  misc_feature 1..319: note = Synthetic construct
  source 1..319: mol_type = other DNA
gacatccagatgacccagtctccatcctccctgtctgcatctattggagacagagtcaccctcacttgtcgggcaagtcagaatattggcaggtatttaaattggtatcagcaaaaaccaggaaaagcccccttgctcctgatctatgctgcagtcagtttgcaaagtggggtcccttcacggttcagtggcagtgggtctgggacagatttcactctcaccatcagcagactgcaatctgaggattttgcaacttacttctgtcaacagagcttcagtagtgtcaccttcggcggagggaccaaggtggagatcaaac

SEQ ID NO: 7804 - DNA, 334 bp, synthetic construct
  misc_feature 1..334: note = Synthetic construct
  source 1..334: mol_type = other DNA
ctgtctgccctgactcagcctgcctccgtgtctgggtctcctggacagccgatcaccatctcctgcactggaagcagcggtgatgttgtaaattatgtccttgtctcccgctaccagcagcacccaggcaaagcccccaaagtcatgatttatgagggcagtaagcggccctcaggggtttctaatcgcttctctggctccaagtctggcaacacggcctccctgacaatctctgggctccaggctgaggacgaggctgattgtcactgctgctcaaatgcaggttgtaggacttggggtgtcttcggaactgggaccgaggtcaccgtcctag

SEQ ID NO: 7805 - DNA, 337 bp, synthetic construct
  misc_feature 1..337: note = Synthetic construct
  source 1..337: mol_type = other DNA
gaaattgtgatgacccagactccactctctctgtccgtcacccctggacagccggcctccatctcctgcaagtctagtgagagtctcctgtatagtgatggaaagacttatttctattggtacctgcagaagccaggccagtctccacagctcctaatctatgaagtttccagccgggtctctggagtgccagataggttcagtggcaccgggtcagggacagatttcacactgaaaatcagccgggtggaggctgaggatgttgggatttattactgcatgcaaggtatataccttccgctcactttcggcggagggaccaaggtggagatcaaac

SEQ ID NO: 7806 - DNA, 322 bp, synthetic construct
  misc_feature 1..322: note = Synthetic construct
  source 1..322: mol_type = other DNA
gccatccagttgacccagtctccatcctccctgtctgcgtctgtaggagacagagccaccatcacttgccgggccagtcagggcattagcagttatttagcctggtatcagcaaaaaccagggaaagcccctaagctcctgatctatgctgcatccactttgcaaagtggggtcccatcaaggttcagcggcagtggatctgggacagatttcactctcaccatcagcagcctgcagcctgaagattttgcaacttattattgtcaacagcttaatagtaacccattcactttcggccctgggaccaaagtggatatcaaac

SEQ ID NO: 7807 - DNA, 91 bp, synthetic construct
  misc_feature 1..91: note = Synthetic construct
  source 1..91: mol_type = other DNA
gcagaagacgaggctgactattactgtcaatcaacagacagtagtggtgattattggctgttcggcggagggacccacctggccgtcctgg

SEQ ID NO: 7808 - DNA, 319 bp, synthetic construct
  misc_feature 1..319: note = Synthetic construct
  source 1..319: mol_type = other DNA
gccatccggatgacccagtctccatcctcactctctgcatctacaggagacagagtcaccatcacttgtcgggcgagtcagggtattagcagttatttagcctggtatcagcaaaaaccagggaaagcccctaagctcctgatctatgctgcatccactttgcaaagtggggtcccatcaaggttcagtggcagtggatctgggacagatttcactctcaccatcagctgcctgcagtctgaagattttgcaacttattactgtcaacagtattatagttacccctttttcggcggagggaccaaggtggagatcaaac

SEQ ID NO: 7809 - DNA, 322 bp, synthetic construct
  misc_feature 1..322: note = Synthetic construct
  source 1..322: mol_type = other DNA
gccatccggatgacccagtctccatcctcactctctgcatctacaggagacagagtcaccatcacttgtcgggcgagtcagggtattagcagttatttagcctggtatcagcaaaaaccagggaaagcccctaagctcctgatctatgctgcatccactttgcaaagtggggtcccatcaaggttcagtggcagtggatctgggacagatttcactctcaccatcagctgcctgcagtctgaagattttgcaacttattactgtcaacagtattatagttacccgtggacgttcggccaagggaccaaggtggaaatcaaac

SEQ ID NO: 7810 - DNA, 322 bp, synthetic construct
  misc_feature 1..322: note = Synthetic construct
  source 1..322: mol_type = other DNA
tccgacgagttgacacagccaccctcggtgtcagtgtccccaggacagacggccaggatcgcctgctctggagatgcattgccaggcaattatgcttattggtaccaacagaagccaggccaggcccctgtattggtgatatataaagacgatgtgaggccctcagggatccctgagcgattctctgcctccaagtcaggggcaacggtcacgttgaccatcaggggagtccaggcagaagacgagggtgactattattgtcagtcatcagacagcagtggtaattttgtcttcggacttgggaccacggtcaccgtcctac

SEQ ID NO: 7811 - DNA, 334 bp, synthetic construct
  misc_feature 1..334: note = Synthetic construct
  source 1..334: mol_type = other DNA
cagtctgtgctgactcagccaccctcagcgtctgggacccccgggcagagggtcaccatctcttgttctggaagcagctccaacatcggaagtaattatgtatactggtaccagcagctcccaggaacggcccccaaactcctcatctataggaataatcagcggccctcaggggtccctgaccgattctctggctccaagtctggcacctcagcctccctggccatcagtgggctccggtccgaggatgaggctgattattactgtgcagcatgggatgacagcctgggtggtggggatgtcttcggaactgggaccaaggtcaccgtcctag

SEQ ID NO: 7812 - DNA, 328 bp, synthetic construct
  misc_feature 1..328: note = Synthetic construct
  source 1..328: mol_type = other DNA
gacatccagatgacccagtctccttccaccctgtctgcatctgtaggagacagagtcaccatctcttgccgggccagtcagagtattagtagctggttggcctggtatcagcagaaacctgggaaagcccctaaactcctgatctataaggcgtctagtttagaaagtggggtcccgtcaaggttcagcggcagtggatctgggacagagttcactctcaccatcaacagcctgcagcctgatgattttgcaacttattactgcctacagtataatagttcttcttcaacatacacttttggccaggggaccaagctggagatcaaac

SEQ ID NO: 7813 - DNA, 331 bp, synthetic construct
  misc_feature 1..331: note = Synthetic construct
  source 1..331: mol_type = other DNA
cagtctgccctgactcagcctgcctccgtatctgggtctgctggacagtcgatcaccatctcctgcactggatccagcagagatgttgggagttataaccttgtctcctggttccaacaacacccaggcaaagcccccaaactcattatttatgaggtcactgaacggccctctggggtttctaatcgcttctctggctccaagtctggcgacacggcctccctgacaatctctggtctccagactgacgacgaggcggattattattgctgctcgtatgcagggactagcactttcgtgttcggcggagggaccaaggtgaccgtcctag

SEQ ID NO: 7814 - DNA, 322 bp, synthetic construct
  misc_feature 1..322: note = Synthetic construct
  source 1..322: mol_type = other DNA
gacatccagatgacccagtctccatcttccgtgtctgcatctgtaggagacagagtcacgatttcttgtcgggcgagtcagggaattagcatctggttagcctggtatcagcaaaaaccagggaaagcccctaaggtcctgatccatgctgcatccagtttgcaaagtgaggtcccgtcaaggttcagcggcagtggatctgggacagatttcactctcaccatcaacagcctgcagcctgaagattttgcaacttactattgtgaacaggctaacagtttcccgctcactttcggcggagggaccaaggtggagatcaaac

SEQ ID NO: 7815 - DNA, 349 bp, synthetic construct
  misc_feature 1..349: note = Synthetic construct
  source 1..349: mol_type = other DNA
cagcctgtgctgactcagccaccttctgcatcagcctccctgggagcctcggtcacactcacctgcaccctgagcagcggctacagcacttataaagtggactggtaccagcagagaccagggaagggcccccggtttgtgatgcgagtgggcactggtgggattgtgggatccaagggggatggcatccctgatcgcttctcagtcttgggctcaggcctgaatcggtacctgaccatcaagaacatccaagaggaggatgaaggtgactatcactgtggggcagaccatgacagtgggagcaacttcgtttatgtcttcggaaatgggaccaaggtgatagtcctgg

SEQ ID NO: 7816 - DNA, 322 bp, synthetic construct
  misc_feature 1..322: note = Synthetic construct
  source 1..322: mol_type = other DNA
gccatccaaatgacccagtctccatccttcctgtctgcatctgtaggagacagagtcaccctcacttgccgggccagtcaggacattgacaattatttagcctggtatcagcaaaaaccagggaaagcccctaaactcctgatctacgttgcatccactttgcagagtggggtcccatcaaggttcagcggcagtggatctgggacagaattcactctcacaatcagcagcctgcagcctgaagattttgcaacgtattactgtcaacaacttaatggttaccctccaacttttggcccggggaccaagctggagatcagag

SEQ ID NO: 7817 - DNA, 306 bp, synthetic construct
  misc_feature 1..306: note = Synthetic construct
  source 1..306: mol_type = other DNA
gaaattgtgttgacgcagtctccaggcaccctgtctttgtctccaggggaaagagccaccctctcctgcagggccagtcagagtgtaagcagcagcttcttagcctggtaccagcagaaacctggccaggctcccaggctcctcatctatggtgcatccagcagggccactggcatcccagacaggttcagtggcagtgggtctgggacagacttcattctcaccatcagcagactggagcctgaagattttgcagtgtattgctgtcaccagtatagtacctcaccgtggacgttcggccgaggg

SEQ ID NO: 7818 - DNA, 340 bp, synthetic construct
  misc_feature 1..340: note = Synthetic construct
  source 1..340: mol_type = other DNA
gacatcgtgatgacccagtctccagactccctggctgtgtctctgggcgagagggccaccatcaactgcaagtccagccagagtcttttatacagctccgacaaaaagaactacttagcttggtaccagcagaaaccaggacagcctcctaagctgctcatttactgggcatctacccgggaatccggggtccctgaccgattcagtggcagcgggtctgggacagatttcactctcaccatcagcagcctgcaggctgaagatgtggcagtttattactgtcaccaatattataatattcctcgaacattcggccaagggaccaaggtggaaatcaaac

SEQ ID NO: 7819 - DNA, 337 bp, synthetic construct
  misc_feature 1..337: note = Synthetic construct
  source 1..337: mol_type = other DNA
gacatcgtgatgacccagtctccagactccctggctgtgtctctgggcgagagggccaccatcaactgcaagtccagccagagtgttttatacagctccaacaataagaactacttagcttggtaccagcagaaaccaggacagcctcctaagctgctcatttactgggcatctacccgggaatccggggtccctgaccgattcagtggcagcgggtctgggacagatttcactctcaccatcagcagcctgcaggctgaagatgtggcagtttattactgtcaccaatattatagtactctcactttcggcggagggaccaaggtggagatcaaac

SEQ ID NO: 7820 - DNA, 334 bp, synthetic construct
  misc_feature 1..334: note = Synthetic construct
  source 1..334: mol_type = other DNA
gatgttgtgctgactcagtctccactctccctgcccgtcacccttggacagccggcctccatctcctgcatgtctagtcaaagcctcctacacagtgatggaaacacctacttgaattggtttcagcagaggccaggccaatctccaaggcgcctaatttataaggtttctaaccgggactctggggtcccagacagattcagcggcagtgggtcaggcactgatttcacactgacaatcagcagggtggaggctgaggatgttggcgtttattactgcatgcaaggtacacacctttacacctttggccaggggaccaagctggagatcaaac

SEQ ID NO: 7821 - DNA, 340 bp, synthetic construct; identical to SEQ ID NO: 1832
  misc_feature 1..340: note = Synthetic construct
  source 1..340: mol_type = other DNA

SEQ ID NO: 7822 - DNA, 334 bp, synthetic construct
  misc_feature 1..334: note = Synthetic construct
  source 1..334: mol_type = other DNA
caatctgccctgactcagcctgcctctgtgtctgggtctcctggacagtcgatcaccatctcctgcactggaaccagcagtgacgttggtacttttaagtatgtctcctggtaccaacaacacccgggcaaagcccccaaggtcctgatttatgaggtcagtcatcggccctcaggggtccctgatcgcttctctggctccaagtctggcaccacggcctccctgaccatctctgggctccaggctgcggacgaggctgattactattgcagctcatatagacgtgacatcgccctttatgtcttcggaaatgggaccagggtcgccgtcctcg

SEQ ID NO: 7823 - DNA, 334 bp, synthetic construct
  misc_feature 1..334: note = Synthetic construct
  source 1..334: mol_type = other DNA
cagtctgccctgactcagcctgcctccgtgtctgggtctcctggacagtcgatcaccatctcctgcactgggagtacctcaaacatcggggcaggttatgatgtacactggttccagcagcttccagggacagcccccaaactcctcatttatggtatcaccagtcggccctcaggggtccctgaccgattctctggctccaagtctggcaacacggcctccctgaccatctctgggctccaggctgacgacgaggctgattattactgcacctcatatacaaacgacagcaattctcaggtattcggcggagggaccaagctgaccgtcctag

SEQ ID NO: 7824 - DNA, 334 bp, synthetic construct
  misc_feature 1..334: note = Synthetic construct
  source 1..334: mol_type = other DNA
cagtctgccctgactcagcctgcctccgtgtctgggtctcctggacagtcgatcaccatctcctgcactggatccagcagtgatgttgggagttataaccttgtctcctggtaccaacaacacccaggcaaagcccccaaactcatgatttatgaggtcactaagcggccctcaggggtttctaatcgcttctctggctccaagtctggcaacacggcctccctgacaatctctgggctccgggctgaggacgaggctgattattcctgctgttcgtatgcaagtagtagcactttcgtgattttcggcggagggaccaagctgaccgtcctgg

SEQ ID NO: 7825 - DNA, 325 bp, synthetic construct
  misc_feature 1..325: note = Synthetic construct
  source 1..325: mol_type = other DNA
tcctatgtgctgactcagccaccctcggtgtcagtggccccaggacagacggccaggattacctgtgggggaaacaacattggaagtaaaagtgtgcactggtaccagcagaagccaggccaggcccctgtgctggtcgtctatgatgatagcgaccggccctcagggatccctgagcgattctctggctccaactctgggagcacggccaccctgaccatcagcagggtcgaagccggggatgaggccgactattactgtcaggtgtgggatagtagtagtgatcattatgtcttcggaattgggaccaaggtcaccgtcctag

SEQ ID NO: 7826 - DNA, 325 bp, synthetic construct
  misc_feature 1..325: note = Synthetic construct
  source 1..325: mol_type = other DNA
gagattgtgttgacacagtctccagccaccctgtctttgtctccaggggaaagagccaccctctcctgcagggccagtcagagtgttggcagctccttaaactggtaccaacaaaaacctggccaggctcccaggctcctcatctatgatgcatccagtagggccactggcatcccggccaggttcagtggcagtgggtctgggacagacttcactctcaccatcagcagcctggagcctgaagattttgcaatttattactgtcaccagcggagcagctggcctccgtacacttatggccaggggaccaagctggagatcaaac

SEQ ID NO: 7827 - DNA, 337 bp, synthetic construct
  misc_feature 1..337: note = Synthetic construct
  source 1..337: mol_type = other DNA
gatgttgtgatgactcagtctccactctccctgcccgtcacccttggacagccggcctccatctcctgcaggtctagtcaaagcctcgtatacagtgatggaaacacctacttgaattggtttcagcagaggccaggccaatctccaaggcgcctaatttataaggtttctaaccgggactatggggtcccagacagattcagcggcagtgggtcagacactgatttcacactgagaatcagcagggtggaggctgaggatgttggactttattactgcatgcagggtacacactggcctcggacgttcggccaagggaccaaggtggaaatcaaac

SEQ ID NO: 7828 - DNA, 322 bp, synthetic construct
  misc_feature 1..322: note = Synthetic construct
  source 1..322: mol_type = other DNA
gaaatagtgatgacgcagtctccagccaccctgtctgtgtctccaggggaaagcgccaccctctcctgcagggccagtcggagtattagcaataccttagcctggtaccagcagaaacctggacaggctcccaggctcctcatctatggtgcatccacgagggccactggtaccacagccaggttcagtggcagtgggtctgggacagagttcactctcaccatcagcagcctgcagtctgaagattttgcagtttattactgtcagcaatataataactggccgtacacttttggccaggggaccaaggtggagatcaaac

SEQ ID NO: 7829 - DNA, 334 bp, synthetic construct
  misc_feature 1..334: note = Synthetic construct
  source 1..334: mol_type = other DNA
cagttaatgctgactcaagcgccctctgcctctgcctcactgggagcctcacttaacctcaaatgcactctggacagtggacacgacacctacgccgtcgcttggcttcagcagcggccagggaagggccctcgattcttgatgacggttgatcctgacggcaattatcatcaggatgacgagttgtctgatcgcttctcaggctccttctctggggctgaccgctacctcaccatctccagcctccagcctgaggatgaggctgactattactgtcagacctgggacactggcgttcgcctgttcggcggagggaccaaggtgaccgtcctgg

SEQ ID NO: 7830 - DNA, 337 bp, synthetic construct
  misc_feature 1..337: note = Synthetic construct
  source 1..337: mol_type = other DNA
cagtctgtgctgacgcagccgccctcagtgtctggggccccagggcagagggtcaccatctcctgcactgggagcagctccaacatcggggcaggttatgatgtacactggtaccagcaacttccaggaacagcccccaaactcctcatctatggtaacagcaatcggccctcaggggtccctgaccgattctctggctccaagtctggcacctcagttttcctggccatcactgggctccaggctgaggatgaggctgattattactgccagtcctatgacttcagcctgagtggttcggatgtcttcggaactgggaccaaggtcatcgtcctag

SEQ ID NO: 7831 - DNA, 325 bp, synthetic construct
  misc_feature 1..325: note = Synthetic construct
  source 1..325: mol_type = other DNA
gaaattgtgttgacgcagtctccaggcaccctgtctttgtctccaggggaaagagccaccctctcctgcagggccagtccgcgtcttagcagcacctacttagcctggtatcagcagaaacatggccaggctcccaggctcctcatctatggtgtatccaccagggccactggcatcccagacaggttcagtggcagtgggtctggggcagacttcactctcaccatcagcagtctgcagcctgaggattttgcagtctattactgtcaacagtatggtacttcacctgtcacttttggccaggggaccaagctggagatcaaac

SEQ ID NO: 7832 - DNA, 325 bp, synthetic construct
  misc_feature 1..325: note = Synthetic construct
  source 1..325: mol_type = other DNA
gaaattgtgttgacacagtctccagccaccctgtctttgtctccaggggaaagagtcaccctctcctgcagggccagtcagagtgttgacaagttcttagtctggtaccaacagaaacctggccaggctcccaggctcctcatctatgatgcatccaagagggccactggcatcccagccaggttcagtggcagtgggtctgggacagacttcactctcaccatcagcagcctagaacctgaggattttgcagtttattactgtgagcaacgtattagctggcctggaatcaccttcggccaagggacacggctggacattaaac

SEQ ID NO: 7833 - DNA, 325 bp, synthetic construct
  misc_feature 1..325: note = Synthetic construct
  source 1..325: mol_type = other DNA
gaaattgtgttgacgcagtctccaggcaccctgtctttgtctcttggggaaagagccaccctctcctgcagggcccgtcagaatgttaattggcgctacctagcctggtaccaacaaaagcctggccaggctcccaggctcctcatctttcgtgcatccaacagggccgatggcatcccagacaggttcagtggcagtgggtctgggacagagtacactctcaccatcaccaggctggagcctgaagatgttgcggtatattattgtcagcagtacggttattcacggtggacattcggccaggggaccaaggtggaaatcaaac

SEQ ID NO: 7834 - DNA, 337 bp, synthetic construct
  misc_feature 1..337: note = Synthetic construct
  source 1..337: mol_type = other DNA
gatgttgtgttgactcagtctccaccctccctgcccgtcgcccttggacagccggcctccatctcctgcaggtctagtcaaagcctcgttcacactgatggaaacacctacctgagttggtttcaccagaggccaggccgagctccagggcgcctaatttataaggtttctaaccgggactctggggtcccagacagattcagcggcagtgggtcagccactgattttacactgagaatcagcagcgtggaggctgaggatgttgggatttattactgcatgcaaggtacacactggcctccggggttcggccaagggaccaaggtggaaatcaaac

SEQ ID NO: 7835 - DNA, 334 bp, synthetic construct
  misc_feature 1..334: note = Synthetic construct
  source 1..334: mol_type = other DNA
cagtctgccctgactcagcctgcctccgtgtctgggtctcctggacagtcgatcaccatctcctgcactggaaccagcagtgacgttggtggttataactatgtctcctggtaccaacaaaacccaggcaaagcccccaaactcatgatttatgatgtcagtaatgggccctcagggatttctaatcgcttctctggctccaagtctggcaacacggcctccctgaccatctctgggctccaggctgacgacgaggctgattattactgcacctcatatacaaacaacagcaattctcaggtattcggcggaggggccaagctgaccgtcctag

SEQ ID NO: 7836 - DNA, 331 bp, synthetic construct
  misc_feature 1..331: note = Synthetic construct
  source 1..331: mol_type = other DNA
cagtctgccctgactcagcctgcctccgtgtctgggtctcctggacagtcgatcaccatctcctgcactggaaccaacagtgatgttgggagttataaccttgtctcctggtaccaaaaccacccaggcaaagcccccaaagtcttgatttatgagggcagtaagcggccctcaggggtttctaatcgcttctctggctccaagtctggcaacacggcctccctgacaatctctgggctccaggctgaggacgaggttgattattactgctgctcatatgcagctagtagagttaaggtgttcggcggaggggccaagctgaccgtcctag

SEQ ID NO: 7837 - DNA, 340 bp, synthetic construct
  misc_feature 1..340: note = Synthetic construct
  source 1..340: mol_type = other DNA
gacttcgtgctgacccagtctccagagtccctggctgtgtctctgggcgagagggccaccatcaactgcaagtccagcccgagtgtcttgtacacctccgacaaaaagaactacttagcttggtaccagcagaagccagggcggccacctaagttactcatttactgggcatctacacgggaatccggggtccctgaccgattcattggcagcgggtctgggacagatttcactctcaccatcaccagcctgcaggctgaagatgtggcagtttattactgtcaccaatattatactcctccattcactttcggccctgggaccaaagtggagatcaaac

SEQ ID NO: 7838 - DNA, 325 bp, synthetic construct
  misc_feature 1..325: note = Synthetic construct
  source 1..325: mol_type = other DNA
gaaattgtgttgacccagtctccagccaccctgtctttgtctccaggggaaagagccgccctctcctgcagggccagtcagagtattagcacctccttagcctggtaccaacagaaacctggccaggctcccaggctcctcatctatgatacatccaacagggtcactggcatcccagccaggttcagtggcagtgggtctgggacagacttcactctcaccatcagcagcctagagcctgaagattttgcagtttattactgtctccaccgtaacaactggcctcccttcactttcggccctgggaccaaagtggaaatcaaac

SEQ ID NO: 7839 - DNA, 331 bp, synthetic construct
  misc_feature 1..331: note = Synthetic construct
  source 1..331: mol_type = other DNA
caggctgtggtgactcaggagccctcactgactgtgtccccaggagggacagtcactctcacctgtggctccagcactggagctgtcaccagtggtcattatccctactggttccagcagaagcctggccaagcccccaggacactgatttatgatacaagcaacaaacactcctggacacctgcccggttctcaggctccctccttgggggcaaagctgccctgaccctttcgggtgcgcagcctgaggatgaggctgagtattactgcttgctctcctatagtggtgctcattatgtcttcggaactgggaccaaggtcaccgtcctag

SEQ ID NO: 7840 - DNA, 322 bp, synthetic construct
  misc_feature 1..322: note = Synthetic construct
  source 1..322: mol_type = other DNA
gacatccagatgacccagtctccatcctccctgtctgcatctgtaggagacagagtcaccatcacttgccgggcaagtcaggacattagaaatgatttaggctggtatcagcagaaaccagggaaagcccctaagcgcctgatctatgttgcatccagtttgcaaagtggggtcccatcaaggttcagcggcagtggatctgggacagaattcactctcacaatcagcagcctgcagcctgaagattttgcaatttattactgtctacagcatgatagttaccccctcactttcggcggagggaccaaggtggagatcaaac

SEQ ID NO: 7841 - DNA, 322 bp, synthetic construct
  misc_feature 1..322: note = Synthetic construct
  source 1..322: mol_type = other DNA
gaaatagtggtgacgcagtctccagccaccctgtctctatctccaggggaaggaggcaccctctcctgcagggccagtcaaagtgttagcaccaacgtgaattggtatcaacagaaacctggccagcctcccaggctcctcatctatgctgcatccaccagggcccctggtgtcccagccaggttcagtggcggtgggtctgggacagacttcactctcaccatcagcagcctggagtctgaagattttgcagtttattactgtctgcagcatattacctggccttggacattcggccaagggaccaaggtggaaatcaaac

SEQ ID NO: 7842 - DNA, 340 bp, synthetic construct
  misc_feature 1..340: note = Synthetic construct
  source 1..340: mol_type = other DNA
gatgttgtgatgactcagtctccactctccctgcccgtcacccttggacagccggcctccatctcctgcaggtccagtcaaagcctcgtacacagtgatggaaacatgtacttgaattggtttcagcagaggccaggccaatctccaaggcgcctaatttataaggtttctaaccgggactctggggtcccagacagattcagtggcagtgggtcaggcactgacttcacactgaaaatcagcagggtggaggctgaggatgttggagtttattactgcatgcaaggtacagactggcccccgtacacttttggccaggggaccaagctggagatcaaac

SEQ ID NO: 7843 - DNA, 340 bp, synthetic construct
  misc_feature 1..340: note = Synthetic construct
  source 1..340: mol_type = other DNA
gatgttgtgatgactcagtctccactctccctgcccgtcacccttggacagccggcctccatctcctgcaggtctagtcaaagcctcgtacacagtgatggaaacacctacttgaattggtttcagcagaggccaggccaatctccaaggcgccttatttataaggtttctaaccgggactctggggtcccagacagattcagcggcagtgggtcaggcactgatttcacactgaaaatcagcagggtggaggctgaggatgttggggtttattactgcatgcaaggtacacactggcctccggtgacgttcggccaagggaccaaggtggaaatcaaac

SEQ ID NO: 7844 - DNA, 322 bp, synthetic construct
  misc_feature 1..322: note = Synthetic construct
  source 1..322: mol_type = other DNA
gacatccagttgacccagtctccatcctccctgtctgcatctataggagacagagtcaccttcacttgcctggccagtcaggacatcactaactttttaaattggtatcagcacaaaccagggaaaccccctaccctcctgatctacgatgcatccagtttgaaagcaggggtcccatcaagattcagtggaagtggctctggaaaaaagtttactttcaccatcaataacctgcagcctgaagatattgcaacatattactgtcagcactatgatcatctcccgtggaccttcggcccagggacccaggtagaagtcagac

SEQ ID NO: 7845 - DNA, 322 bp, synthetic construct
  misc_feature 1..322: note = Synthetic construct
  source 1..322: mol_type = other DNA
gacatccagatgacccagtctccatcctccctgtctacatctgtcggagacagagtgaccatcacgtgccaggcgagtcaggacataaccaaatatttaagttggtatcagcagagaccagggaaagcccctaagctcctgatctccgatgcttccaatttggaagcaggggtcccatctaggttcagtggcggtggatctgggacagattttactctcaccatcaacagcctacagcctgaagatattgcaacatattactgtcaacagtgtgatgatctcccgtacacttttggccaggggaccaagctggagatcaaac

SEQ ID NO: 7846 - DNA, 322 bp, synthetic construct
  misc_feature 1..322: note = Synthetic construct
  source 1..322: mol_type = other DNA
gacatccagatgacccagtctccatcctccctgtctgcatctgtaggagacagagtcaccatcacttgccgggcgagtcaggacattagcacttctctagcctggtatcagcagagaccagggaaagcccctaaactcctgctctatgttacatccagattggaaagtggggtcccatttcggttcagtggcagtggatctgggacggctttcactctcagcatcagcagcctgcagcctgaagattttgcaacttattactgtcaacagttttatggtgccccattcactttcgggcctgggaccaaagtggatatgaaac

SEQ ID NO: 7847 - DNA, 322 bp, synthetic construct
  misc_feature 1..322: note = Synthetic construct
  source 1..322: mol_type = other DNA
gaaattgtgttgacacagtctccagccaccctgtctttgtctccaggagaaagagccaccctctcctgcagggccagtcagagtattgacaccttcttaggctggtaccaacaaaaacctggccaggctcccagtctcctcatctatgatgcatccaacagggccagtggcatcccagccaggttcagtggcagtgggtctgggacagacttcattctcaccatcaccagcctagagcctgaagattttgctgtttattactgtcagcagcgcagcaactggcctctcactttcggcggagggaccagggtggagatcaaac

SEQ ID NO: 7848 - DNA, 322 bp, synthetic construct
  misc_feature 1..322: note = Synthetic construct
  source 1..322: mol_type = other DNA
gacatccagatgacccagtctccatcctccctgtctgcatctgtaggagacagagttaccatcacttgccgggctagtcagagcattagcagttttttaaattggtatcagcagaaaccagggaaagcccctaaactcctgatctatgctgaatccagtttacaaagtggtgtcccctcaagattcactggcagtggatctgggacagatttcactctcaccatcaacagtctgcaacctgaagattttgcaacctacttctgtcaacagagttacgcctccccgactacgtttggccaagggaccagggtggaaatcaaac

SEQ ID NO: 7849 - DNA, 322 bp, synthetic construct
  misc_feature 1..322: note = Synthetic construct
  source 1..322: mol_type = other DNA
gacatccagatgacccagtctccctcctccctgtctgcatctgtcggagacagagtcaccatcacttgccgggcaagtcagaccattatcacctatttaagttggtatcagaagaaaccagggacagcccctaagctcctgatctatgctgcgtcccatttacacagtggggtcccatcaagattcggtggcggtggatctgggacagagttcaccctcaccatcggcagtctacaacctgaagattttgcaacttactactgtcaacagagttacagaattcctcacacctttggccaggggaccaagctggagatcaacc

SEQ ID NO: 7850 - DNA, 322 bp, synthetic construct
  misc_feature 1..322: note = Synthetic construct
  source 1..322: mol_type = other DNA
gacatccagatgacccagtctccatcctccctgtctgcatctgtaggagacagagtcaccatcacttgccgggcaagtcagagcattagcagctatttaaattggtatcagcagaaaccagggaaagcccctaagctcctgatctatgctgcatccagtttgcaaagtggggtcccatcaaggttcagtggcagtggatctgggacagatttcactctcaccatcagcagtctgcaacctgaagattttgcaacttactactgtcaacagagttacagtaccccgctcactttcggcggagggaccaaggtggagatcaaac

SEQ ID NO: 7851 - DNA, 319 bp, synthetic construct
  misc_feature 1..319: note = Synthetic construct
  source 1..319: mol_type = other DNA
gacatccagatgacccagtctccatcctccctgtctgcatctgtgggagacagagtcaccatcacttgccgggcaagtcagagcattagtaattatttacattggtatcagcagaaaccagggagcgcccctaaactcctgatctatgctgcatacagattagaaaccggggtcccatcaaggttcagtggcagtgcatctggggcagacttcactctcaccatcagcagtctgcaacctgaagattttgcaacttacttctgtcaacagacttacaatacgatcactttcggcggcgggaccaaggtggagatcagac

SEQ ID NO: 7852 - DNA, 322 bp, synthetic construct
  misc_feature 1..322: note = Synthetic construct
  source 1..322: mol_type = other DNA
gacatccacctgacccagtctccatcctccctgtctgcatctgcaggagacagggtcctcatcacttgccaggcgagtcaagacattaagaactacttaaattggtatcaacagaagccaggggaagcccctaacgtcctgatctacgatgcaaccaatttagagacaggggtctcatcaaggttcagtggaagtggatctgggacagatttcactctcaccatcaacagcctgcagcctgaagatattgcaacatatttctgtcaacaatatgatagtctcccggtcactttcggcggcgggaccaaggtgcagatcaaac

SEQ ID NO: 7853 - DNA, 325 bp, synthetic construct
  misc_feature 1..325: note = Synthetic construct
  source 1..325: mol_type = other DNA
gaagttgtgttgacgcagtctccagacaccctctctttatatccaggggaaagagccaccctctcctgcagggccagtcagagtgtgagttccagttacttatcctggtaccaacaaaaacctggccaggctcccagactcctcatctatggtgcctccaccagggccactggcatcccagacaggttcattggcagtgggtctgggacagacttcactctcaccatcaacagactggagcctgaagattttgcagtgtattactgtcaacaatatggtagctccctgtacagttttggccaggggaccaagctggagatcaaac

SEQ ID NO: 7854 - DNA, 325 bp, synthetic construct
  misc_feature 1..325: note = Synthetic construct
  source 1..325: mol_type = other DNA
gaaattgtgttgacgcagtctccagacaccctgtctttgtctccaggggaaagagccaccctctcctgtagggccagtcagagtgttaacagcaactacttagcctggtaccagcagaagcttggccaggctcccaggctcctcttctttggtgcatccagcagggccactggcatcccagacaggttcagtggcagtgggtctgggacagacttcactctgaccatcagcagactggagcctgaagattttgcaatatattactgtcagcagtatggtagctcaccgctcactttcggcggagggaccaaggtggagatcaaac

SEQ ID NO: 7855 - DNA, 331 bp, synthetic construct
  misc_feature 1..331: note = Synthetic construct
  source 1..331: mol_type = other DNA
gaaattgtgttgacgcagtctccaggcaccctgtctttgtctccaggggaaagagccaccctctcctgcagggccagtcagagtgttagcagcagctacttagcctggtaccagcagaaacctggccaggctcccaggctcctcatctatggtgcatccagcagggccactggcatcccagacaggttcagtggcagtgggtctgggacagacttcactctcaccatcagcagactggagcctgaagattttgcagtatattactgtcagcagtatggtagctcacctccgcggttcactttcggccctgggaccaaagtggatatcaaac

SEQ ID NO: 7856 - DNA, 322 bp, synthetic construct
  misc_feature 1..322: note = Synthetic construct
  source 1..322: mol_type = other DNA
gacattcagatgactcagtcccccagctccctgtcagcaagcgtgggggaccgggtctccatcacctgccaggcctcacaggatattagcagatacctgaactggtatcagcagaagcccggagaggcccctaaactgctgatctacgacgcttccaatctggaaacaggcgtgccttctaggttctccggctctgggagtggaactgacttcacctttacaatctctagtctgcagccagaggatattgctacatatttctgtcagcagtacggctatctgccactgacttttggccccgggaccaaggtcgatagcaaac

SEQ ID NO: 7857 - DNA, 322 bp, synthetic construct
  misc_feature 1..322: note = Synthetic construct
  source 1..322: mol_type = other DNA
gacatccagatgacccagtctccttccaccctgtctgcatctgtaggagacagagtcaccatcacttgccgggccagtcagagtgttagtgattggttggcctggtatcagcagaaaccagggaaagcccctaaactcctgatttataaggcgtctaatttagaaagtggggtcccattaaggttcagcggcagtggatctgggacagaattcactctcaccatcagcagcctgcagcctgatgattttgcagtttattactgccaacagtataatgcttacccattcactttcggccctgggaccacagtggaaatcaaac

SEQ ID NO: 7858 - DNA, 325 bp, synthetic construct
  misc_feature 1..325: note = Synthetic construct
  source 1..325: mol_type = other DNA
gaaatagtgatgaggcagtctccagccaccctgtctgtgtctccaggggaaagagccaccctctcctgcagggccagtcagagtgttagaaccaacatagcctggtaccaacaaaaacctggccaggctcccaggctcctcatctatgatgcgtccaccagggtcactggtatcccagccaggttcagtggcagtgggtctgggacagagttcactctcaccatcagcagcctgcagtttgaggattttgcagtttattactgtcagcagtataatcattggctccctctcactttcggcggagggaccaaggtggagatcaaac

SEQ ID NO: 7859 - DNA, 325 bp, synthetic construct
  misc_feature 1..325: note = Synthetic construct
  source 1..325: mol_type = other DNA
gaaatagtgatgacgcagtctccagccaccctgtctgtgtctccaggggggcgagccaccctctcctgcagggccagtcagagtgttggcagcaacttagcctggtaccagcagaaacctggccaggctcccaagctcctcatctctgctgcatccaccagggccactggtatcccagccaggttcagtggcagtggatctgggacaaatttcactctcaccatcagcagcctgcagtctgaagattttgcagtttattactgtcagcaatataataagtggcctccgtggacgttcggccaagggaccaaggtggacatcaaac

SEQ ID NO: 7860 - DNA, 325 bp, synthetic construct
  misc_feature 1..325: note = Synthetic construct
  source 1..325: mol_type = other DNA
gaaatagtgatgacgcagtctccagccaccctgtctgtgtctccaggggaaagagccaccctctcctgcagggccagtcagagtgttagcagcaacttagcctggtaccagcagaaacctggccaggctcccaggctcctcatctatggtgcatccaccagggccactggtatcccagccaggttcagtggcagtgggtctgggacagagttcactctcaccatcagcagcctgcagtctgaagattttgcagtttattactgtcagcagtataataactggcccccattcactttcggccctgggaccaaagtggatatcaaac

SEQ ID NO: 7861 - DNA, 322 bp, synthetic construct
  misc_feature 1..322: note = Synthetic construct
  source 1..322: mol_type = other DNA
gaaatagtgatgacgcagtccccagccaccctgtctgtgtctccaggggacagagccaccctctcctgcagggccagtcagagtgttagcagcaacttagcctggtaccagcagaaacctggccaggctcccaggctcctcatctctggtgcatccaccagggccactgttatcccagccaggttcagtggcagtgggtctgggacagagttcactctcaccatcagcagcctgcaatctgaagattttgcagtttattactgtcagcagtataatagctggccatttactttcggccctgggaccaaactggatatcaaac

SEQ ID NO: 7862 - DNA, 319 bp, synthetic construct
  misc_feature 1..319: note = Synthetic construct
  source 1..319: mol_type = other DNA
gacatccagatgacccagtctccttccaccctgtctgcatctgtaggagacagagtcaccatcacttgccgggccagtcagagtattagtagctggttggcctggtatcagcagaaaccagggaaagcccctaagctcctgatctataaggcgtctagtttagaaagtggggtcccatcaaggttcagcggcagtggatctgggacagaattcactctcaccatcagcagcctgcagcctgatgattttgcaacttattactgccaacagtataatagttattggacgttcggccaagggaccaaggtggaaatcaaac

SEQ ID NO: 7863 - DNA, 325 bp, synthetic construct
  misc_feature 1..325: note = Synthetic construct
  source 1..325: mol_type = other DNA
gaaatagtgctgacgcagtctccagccaccctgtctctgtctccaggggaaagagccaccctctcctgcagggccagtcaaagtgttagcagcaacttagcctggtaccagcagaaacctggccaggctcccaggctcgtcatccatgatgtatcctccagggccaccggtatcccagccaggttcagtggcagtgggtctgggacagacttcactctcaccatcagcagcctgcagtctgaagattttgcagtttattactgtcagcaatataatgtctggcctacgatcaccttcggccaagggacacgactggagattaaac

SEQ ID NO: 7864 - DNA, 325 bp, synthetic construct
  misc_feature 1..325: note = Synthetic construct
  source 1..325: mol_type = other DNA
gaaattgtgttgacgcagtctccaggcaccctgtctttgtctccaggggaaagagccaccctctcctgcaggcccagtcagagtgttagcagcaactacttagcctggtaccagcagaaacctggccaggctcccaggctcctcatctatggtgcatccagcagggccaccggcgtcccagacaggttcagtggcagtgggtctgggacagacttcactctcaccatcagcagactggagcctgaagattctgcagtgtattactgtcagcagtatcgtagctcaccattcactttcggccctgggaccaaagtggatatcaaac

SEQ ID NO: 7865 - DNA, 325 bp, synthetic construct
  misc_feature 1..325: note = Synthetic construct
  source 1..325: mol_type = other DNA
gaaattgtgttgacgcagtctccaggcaccctgtctttgtctccaggggaaagagccaccctctcctgcagggccagtcagagtgttagcagcagctacttagcctggtaccagcagaaacctggccaggctcccaggctcctcatctatggtgcatccagcagggccactggcatcccagacaggttcagtggcagtgggtctgggacagacttcactctcaccatcagcagactggagcctgaagattttgcagtgtattactgtcagcagtatcgttactcaccgaggacgttcggccaagggaccaaggtggaaatcaaac

SEQ ID NO: 7866 - DNA, 337 bp, synthetic construct
  misc_feature 1..337: note = Synthetic construct
  source 1..337: mol_type = other DNA
gacatcgtgatgacccagtctccagactccctggctgtgtctctgggcgagagggccaccatctactgcaggtccagccagagtgttttatccagaatcaacgataagaattacctagcttggtaccagcagaaatcaggacagcctcctaagctgctcctttactgggcatctacccgggaatccggggtccctgaccgattcagtggcagcgggtctgggacagatttcactctcaccatcagcagcctgcaggctgaagatgtggcagtttattactgtcagcaatattctagtttcgggactttcggccctgggaccaaagtggatatcaaac

SEQ ID NO: 7867 - DNA, 340 bp, synthetic construct
  misc_feature 1..340: note = Synthetic construct
  source 1..340: mol_type = other DNA
gacatcgtgatgacccagtctccagactccctgggtgtgtctctgggcgagcgggccaccatcaactgcaagtccagccagagtcttttctacagctccaacaataagacctacctagcttggtaccagcagagaccacgacagtctcctagactgctcatttactgggcatctacccgggaatctggggtccctgaccgattcagtggcagcgggtctgcgacagatttcactctcaccatcagcagcctgcaggctgaagatgtggcaatttattactgtcagcaatattataatactccgtacacttttgcccaggggaccaaactggagatcaaac

SEQ ID NO: 7868 - DNA, 322 bp, synthetic construct
  misc_feature 1..322: note = Synthetic construct
  source 1..322: mol_type = other DNA
gtcatctggatgacccagtctccatccttactctctgcatctacaggagacagagtcaccatcagttgtcggatgagtcagggcattagcagttatttagcctggtatcagcaaaaaccagggaaagcccctgagctcctgatctatgctgcatccactttgcaaagtggggtcccatcaaggttcagtggcagtggatctgggacagatttcactctcaccatcagttgcctgcagtctgaagattttgcaacttattactgtcaacagtattatagtttccctcgaacgttcggccaagggaccaaggtggaaatcaaac

SEQ ID NO: 7869 - DNA, 340 bp, synthetic construct
  misc_feature 1..340: note = Synthetic construct
  source 1..340: mol_type = other DNA
gacatcgtgatgacccagtctccagactctctggctgtgtctctgggcgagagggccaccatcaactgcaagtccagccagagtgttttatacagctccaacaataagaactacttagcttggtaccagcacaaaccaggacagcctcctaagctgctcgtttactgggcatctacccgggaatccggggtccctgaccgattcagtggcagcgggtctgggacagatttcactctcaccatcagcagcctgcaggctgaagatgtggcagtttattactgtcagcaatattatagtactccgtacacttttggccaggggaccaagctggagatcaaac

SEQ ID NO: 7870 - DNA, 322 bp, synthetic construct
  misc_feature 1..322: note = Synthetic construct
  source 1..322: mol_type = other DNA
gccatccggataacccagtctccatcctcactctctgcatctacaggagacagagtcaccatcacttgtcgggcgagtcagggtattagcagttatttagcctggtatcagcaaaaaccagggaaagcccctaagctcctgatctatgctgcatccactttgcaaagtggggtcccatcaaggttcagcggcagtggatctgggacagatttcactctcaccatcagctgcctgcagtctgaagattttgcaacttattactgtcaacagtattatagttaccctctaacgttcggccaagggaccaaggtggaaatcaaac

SEQ ID NO: 7871 - DNA, 340 bp, synthetic construct
  misc_feature 1..340: note = Synthetic construct
  source 1..340: mol_type = other DNA
gacatcgtgatgacccagtctccagactccctggctgtgtctctgggcgagagggccaccatcaactgcaagtccagtcagactgttttatacacctccactaataagaacttcttagcttggtttcagcagaaaccaggccagcctcctaagctgctcatttcctgggcatctagccgggaatccggggtccctgaccgattcagtggcagcgggtctgggacagatttcactctcaccatcagcagcctgcaggctgaagatgtggcagtttattactgtcaacagtattatactattccgcggacgttcggccaggggaccaaggtggaaatcaaac

SEQ ID NO: 7872 - DNA, 325 bp, synthetic construct
  misc_feature 1..325: note = Synthetic construct
  source 1..325: mol_type = other DNA
tcctatgagctgacacagccaccctcggtgtcagtgtccccaggacagacggccaggatcacctgctctggagatgcattgccaaagcaatatacttattggtaccagcagaagccaggccaggcccctgtgctgatgatatataaagacactgagaggccctcagggatccctgagcgattctctggctccagctcagggacaacagtcacgttgaccatcagtggagtccgggcagaagacgaggctgactattattgtcaatcagcagacagcggtggtacttctgtgacattcggcggagggaccaagctgaccgtcctag

SEQ ID NO: 7873 - DNA, 325 bp, synthetic construct
  misc_feature 1..325: note = Synthetic construct
  source 1..325: mol_type = other DNA
tcttctgagctgactcaggaccctggtgtgtctgtggccttgggacagacagtcaggatcacatgccaaggagacagcctcagaaggtattatgcaagttggtaccaacagaaaccaagacaggcccctctacttgtcatctatggtaacaataatcggccctcagggatcccagaccgattctctggctccaggtcaggaaacacagcttccttgaccatcactggggctcgggcggaagatgaggctgactattactgtcagtcccgggacagcagtggtaaccagctggtgttcggcagagggacgaagctgatcgtcctag

SEQ ID NO: 7874 - DNA, 322 bp, synthetic construct
  misc_feature 1..322: note = Synthetic construct
  source 1..322: mol_type = other DNA
tcctatgagctgacacagccaccctcggtgtcagtgtccccaggacagacggccaggatcacctgctctggagatgcattgtcaaagcaatatgcttattggtaccagcagaagccaggccaggcccctgtgatgatgatatataaagacactgagaggccctcagggatccctgagcgattctctggctccagctcagggacaacagtcacgttgaccatcagtggagtccaggcagaagacgaggctgactattactgtcaatcagtagacagaagtggttctcatgtcttcggaagtgggaccaaggtcaccgtcctag

SEQ ID NO: 7875 - DNA, 325 bp, synthetic construct
  misc_feature 1..325: note = Synthetic construct
  source 1..325: mol_type = other DNA
tcctatgtgctgactcagccaccctcggtgtcagtggccccaggacagacggcctacttttcctgtgggggaaccaacattggaagtaaaagtgtgcactggtaccagcagaagccaggccaggcccctctggtggtcgtctatgatgacagtgcccggccctcagggatccctgagcgattctctggatccaattctgggaacacggccaccctgaccatcagcagggtcgaaggcggggatgaggccgactattactgtcaggtgtgggatagtagtagtgatcattgggtgttcggcggagggacgaagctgaccgtcctag

SEQ ID NO: 7876 - DNA, 334 bp, synthetic construct
  misc_feature 1..334: note = Synthetic construct
  source 1..334: mol_type = other DNA
cagtctgccctgactcagcctgcctccgtgtctgggtctcctggacagtcgatcaccatctcctgcactggaaccagcagtgacgttggtggttataactatgtctcctggtaccaacaaaacccaggcaaagcccccaaactcatgatttatgatgtcactaatcggccctcagggatttctaatcggttctctggctccaagtctggcaacacggcctccctgaccatctctgggctccaggctgacgacgaggctgattattactgcacctcatatacaaacgacagcaattctcaggcattcggcggagggaccaagctgaccgtcctag

SEQ ID NO: 7877 - DNA, 334 bp, synthetic construct
  misc_feature 1..334: note = Synthetic construct
  source 1..334: mol_type = other DNA
cagtctgccctgactcagcctgcctccgtgtctgggtctcctggacagtcgatcaccatctcctgcactggaaccagcagtgacgttggtggttataactatgtctcctggtaccaacaaaacccaggcaaagcccccaaactcatgatttatgatgtcagtaatcggccctcagggatttctaatcgcttctctggctccaagtctggcaacacggcctccctgaccatctctgggctccaggctgacgacgaggctgattattactgcacctcatatacaaacgacagcaattctcagctattcgtcggagggaccaagctgaccgtcctag

SEQ ID NO: 7878 - DNA, 334 bp, synthetic construct
  misc_feature 1..334: note = Synthetic construct
  source 1..334: mol_type = other DNA
cagtctgccctgactcagcctgcctccgtgtctgggtctcctggacagtcgatcaccatctcctgcagtggaaccagcagtgacgttggtggttataagtatgtctcctggtaccaacaaaatccagacaaagcccccaaactcatgatttatgatgtcagtaatcggccctcagggatttctaatcgcttctctggctccaagtctggcaacacggcctccctgaccatctctgggctccaggctgacgacgagggtgattattactgcacctcatatacaaacgacagcaattctcaggtattcggcggagggaccaggctgaccgtcctag

SEQ ID NO: 7879 - DNA, 333 bp, synthetic construct
  misc_feature 1..333: note = Synthetic construct
  source 1..333: mol_type = other DNA
cagtctgccctgactcagcctgcctccgtgtctgggtctcctggacagtcgatcaccatctcctgcactggaaccagcagtgacgttggtggttataactatgtctcctggtaccaacaaaacccagccaagcccccaaactcatgatttatgatgtcagtaatcggccctcagggatttctaatcgcttctctggctccaagtctggcaacacggcctccctgaccatctctgggctccaggctgacgacgaggctgattattactgcacctcatatacaaacgacagcaattctcaggtattcggcggagggaccaaggtgaccgtcctag

SEQ ID NO: 7880 - DNA, 334 bp, synthetic construct
  misc_feature 1..334: note = Synthetic construct
  source 1..334: mol_type = other DNA
cagtctgccctgactcagcctgcctccgtgtctgggtctcctggacagtcgatcaccatctcctgcactggaaccagcagtgacgttggtggttataagtatgtctcctggtaccaacaaaacccaggcaaagcccccaaactcatgatttatgatgtcagtaatcggccctcagggatttctaatcgcttctctggctccaagtctgacaacacggcctccctgaccatctctgggctccaggctgacgacgaggctgattattactgcacctcatatacaaacgacagcaattctcaggtattcggcggagggaccaacctgaccgtcctaa

SEQ ID NO: 7881 - DNA, 334 bp, synthetic construct
  misc_feature 1..334: note = Synthetic construct
  source 1..334: mol_type = other DNA
cagtctgccctgactcagcctgcctccgtgtctgggtctcctggacagtcgatcaccatctcctgcactggaaccagcagtgacgttggtagttataactatgtctcctggtaccaacaaaacccaggcaaagcccccaaactcatgatttctgatgtcagtaatcggccctcagggatttctaatcgcttctctggctccaagtctggcaacacggcctccctgaccatctctgggctccaggctgacgacgaggctgattattactgcacctcatatacaaacgacagcaattctcaggtattcggcggagggaccaacctgaccgtcctag

SEQ ID NO: 7882 - DNA, 334 bp, synthetic construct
  misc_feature 1..334: note = Synthetic construct
  source 1..334: mol_type = other DNA
cagtctgccctgactcagcctgcctccgtgtctgggtctcctggacagtcgatcaccatctcctgcactggaaccagcagtgacgttggtggttataactatgtctcctggtaccaacaaaacccaggcaaagcccccaaactcatgatttatgatgtcagtaatcggccctcagggatttctaatcgcttctctggctccaagtctggcaacacggcctccctgaccatctctgggctccaggctgacgacgaggctgattattactgcacctcatatacaaacgacagcaattctcaggtattcggcggagggaccaagctgaccgtcctag

SEQ ID NO: 7883 - DNA, 334 bp, synthetic construct
  misc_feature 1..334: note = Synthetic construct
  source 1..334: mol_type = other DNA
cagtctgccctgactcagcctgcctccgtgtctgggtctcctggacagtcgatcaccatctcctgcactggaaccagcagtgacgttggtggttataactatgtctcctggtaccaacaaaacccaggcaaagcccccaaactcatgatttatgatgtcagtaatcggccctcagggatttctaatcgcttctctggctccaagtctggcaacacggcctccctgaccatctctgggctccaggctgacgacgaggctgattattactgcacctcatatacaaacgacaccaattctcaggtattcggcggagggaccaagctgaccgtcctag

SEQ ID NO: 7884 - DNA, 334 bp, synthetic construct
  misc_feature 1..334: note = Synthetic construct
  source 1..334: mol_type = other DNA
cagtctgccctgactcagcctgcctccgtgtctgggtctcctggacagtcgatcaccatctcctgcactggaaccagcagtgacgttggtgtttataactatgtctcctggtaccaacaaaacccaggcaaagcccccaaactcatgatttatgatgtcagtaatcggccctcagggatttctaatcgcttctctggctccaagtctggcaacacggcctccctgaccatctctgggctccaggctgacgacgacactgattattactgcacctcatatacaaacaacaacaattctcaggtattcggcggagggaccaacctgaccgtcctag

SEQ ID NO: 7885 - DNA, 334 bp, synthetic construct
  misc_feature 1..334: note = Synthetic construct
  source 1..334: mol_type = other DNA
cagtctgccctgactcagcctgcctccgtgtctgggtctcctggacagtcgatcaccatctcctgcactggaaccagcagtgacgttggtggttataactatgtctcctggtaccaacaaaacccaggcaaagcccccaaactcatgatttatgatgtcagtaatcggccctcagggatttctaatcgcttctctggctccaagtctggcaacacggcctccctgaccatctctgggctccaggctgacgacgaggctgattattactgcacctcatatacaaacaacaacaattctcaggtattcggcggagggaccaacctgaccgtcctag

SEQ ID NO: 7886 - DNA, 334 bp, synthetic construct
  misc_feature 1..334: note = Synthetic construct
  source 1..334: mol_type = other DNA
cagtctgccctgactcagcctgcctccgtgtctgggtctcctggacagtcgatcaccatctcctgcactggaaccagcagtgacgttggtggttataagtatgtctcctggtaccaacaaaacccaggcaaagcccccaaactcatgatttatgatgtcagtaatcggccctcagggatttctaatcgcttctctggctccaagtctgacaacacggcctccctgaccatctctgggctccaggctgacgacgaggctgattattactgcacctcatatacaaacaacagcaattctcatgtattcggcggagggaccaacctgaccgtcctaa

SEQ ID NO: 7887 - DNA, 334 bp, synthetic construct
  misc_feature 1..334: note = Synthetic construct
  source 1..334: mol_type = other DNA
cagtctgccctgactcagcctgcctccgtgtctgggtctcctggacagtcgatcaccatctcctgcactggaaccagcagtgacgttggtggttataactatgtctcctggtaccaacaaaacccaggcaaagcccccaaactcatggtttctgatgtcagtaatcggccctcagggatttctaatcgcttctctggctccaagtctggcaacacggcctccctgaccatctctgggctccaggctgacgacgaggctgattattactgcacctcatatacaaacaacagcaattctcaggtattcggcggagggaccaagctgaccgtcctag

SEQ ID NO: 7888 - DNA, 334 bp, synthetic construct
  misc_feature 1..334: note = Synthetic construct
  source 1..334: mol_type = other DNA
cagtctgccctgactcagcctgcctccgtgtctgggtctcctggacagtcgatcaccatctgctgcactggaaccagtagtgacgttggtggttataactatgtctcctggtaccaacaaaacccaggcaaagcccccaaactcatgatttatgatgtcagtaatcggccctcagggatttctaatcgcttctctggctccaagtctggcaacacggcctccctgaccatctctgggctccaggctgacgacgaggctgattattactgcacctcatatacaaacaacagcaattctcaggtattcggcggagggaccaacctgaccgtcctag

SEQ ID NO: 7889 - DNA, 334 bp, synthetic construct
  misc_feature 1..334: note = Synthetic construct
  source 1..334: mol_type = other DNA
cagtctgccctgactcagcctgcctccgtgtctgggtctcctggacagtcgatcaccatctcctgcactggaaccagcagtgacgttggtggttataactatgtctcctggtaccaacaaaacccaggcaaagcccccaaactcatgatttatgatgtcagtaatcggccctcagggatttctaatcgcttctctggctccaagtctggcaacacggcctccctgaccatctctgggctccaggctgacgacgaggctgattattactgcacctcatatacaaacaacagcaattctcaggtattcggcggagggaccaagctgaccgtcctag

SEQ ID NO: 7890 - DNA, 334 bp, synthetic construct
  misc_feature 1..334: note = Synthetic construct
  source 1..334: mol_type = other DNA
cagtctgccctgactcagtttgcctccgtgtctgggtctcctggacagtcgatcaccatctcctgcactggaaccagcagtgacgttggtggttataactatgtctcctggtaccaacaaaacccaggcaaagcccccaaactcatgatttatgatgtcactaatcggccctcagggatttctaatcgcttctctggctccaagtctggcaacacggcctccctgaccatctctgggctccaggctgacgacgaggctgattattactgcacctcatatacaaacaacagcaattctcaggtattcggcggagggaccacgctgaccgtcctag

SEQ ID NO: 7891 - DNA, 334 bp, synthetic construct
  misc_feature 1..334: note = Synthetic construct
  source 1..334: mol_type = other DNA
cagtctgccctgactcagcctgcctccgtgtctgggtctcctggacagtcgatcaccatttcctgcactggaaccagcagtgacgttggtgcttataagtatgtctcctggtaccaacaaaacccaggcaaagcccccaaactcatgatttatgatgtcagtaatcggccctcagggatttctaatcgcttctctggctccaagtctggcaacacggcctccctgaccatctctgggctccaggctgacgacgaggctgattattactgcacctcatatacaaacaacagcaattctcaggtattcggcggagggaccaagctgaccgtcctag

SEQ ID NO: 7892 - DNA, 333 bp, synthetic construct
  misc_feature 1..333: note = Synthetic construct
  source 1..333: mol_type = other DNA
cagtctgccctgactcagcctgcctccgtgtctgggtctcctggacagtcgatcaccatctcctgcactggaaccagcagtgacgttggtggttataactatgtctcctggtaccaacaaaacccaggcaaagcccccaaattatgatttatgatgtcagtaatcggccctcagggatttctaatcgcttctctggctccaagtctggcaacacggcctccctgaccatctctgggctccaggctgacgacgaggctgattattactgcacctcatatacaaacaacagcaattcccaggtattcggcggagggaccaagctgaccgtcctag

SEQ ID NO: 7893 - DNA, 333 bp, synthetic construct
  misc_feature 1..333: note = Synthetic construct
  source 1..333: mol_type = other DNA
cagtctgccctgactcagcctgcctccgtgtctgggtttcttggacagtcgatcaccatctcctgcactggaaccagcagtgacgttggtggttataactatgtctcctggtaccaacaaaacccagccaagcccccaaactcattatttatgatgtcagtaatcggccctcagggatttctaatcgcttctctggctccaagtctggcaacacggcctccctgaccatctctgggctccaggctgacgacgaggctgattattactgcacctcatatacaaacaacagcaattctcaggtattcggcggagggaccaagctgaccgtcctag

SEQ ID NO: 7894 - DNA, 334 bp, synthetic construct
  misc_feature 1..334: note = Synthetic construct
  source 1..334: mol_type = other DNA
cagtctgccctgactcagcctgcctccgtgtctgggtctcctggacagtcgatcaccatctcctgcactggaaccagcagtgacgttggtggttataactatgtctcctggtaccaacaaaacccaggcaaagcccccaaactcatgatttatgatgtcagtaatcggccctcagggatttctaatcgcttctctggctccaagtctgacaagacggcctccctgaccatctctgggctccaggctgacgacgaggctgattattactgcacctcatatacaaacaacagcaattctcaggtattcggcggagggaccacgctgaccgtcctag

SEQ ID NO: 7895 - DNA, 334 bp, synthetic construct
  misc_feature 1..334: note = Synthetic construct
  source 1..334: mol_type = other DNA
cagtctgccctgactcagcctgcctccgtgtctgggtctcctggacagtcgatcaccatctcctgcactggaaccagcagtgacgttggtggttataactatgtctcctggtaccaacaaaacccaggcaaagcccccaaactcatgatttatgatgtcagtaatcggccctcagggatttctaatcgcttctctggctccaagtctggcaacacggcctccctgaccatctctgggctccaggctgacgacgaggctgattattactgcacctcatatacaaacaacagcaattctcaggtattcggcggagggaccaacctgaccgtcctag

SEQ ID NO: 7896 - DNA, 334 bp, synthetic construct
  misc_feature 1..334: note = Synthetic construct
  source 1..334: mol_type = other DNA
cagtctgccctgactcaggctgcctccgtgtctgggtctcctggacagtcgatcaccatctcctacactggaaccagcagtgacgttggtgcttataactatgtctcctggtaccaacaaaacccaggcaaagcccccaaactcatgatttatgatgtcagtaatcggccctcagggatttctaatcgcttctctggctccaagtctggcaacacggcctccctgaccatctctgggctccaggctgacgacgaggctgattattactgcacctcatatacaaacaacagcaattctcaggtattcggcggaggggccaagctgaccgtcctag

SEQ ID NO: 7897 - DNA, 334 bp, synthetic construct
  misc_feature 1..334: note = Synthetic construct
  source 1..334: mol_type = other DNA
cagtctgccctgactcagcctgcctccgtgtctgggtctcctggacagtcgatcaccatctcctgcagtggaaccagcagtgacgttggtggttataagtatgtctcctggtaccaacaaaacccaggcaaagcccccaaactcatgatttatgatgtcagtaatcggccctcagggatttctaatcgcttctctggatccaagtctggcaacacggcctccctgaccatctctgggctccaggctgacgacgaggctgattattactgcacctcatatacaaacaacagcaattctcaggtattcggcggagggcccaagctgaccgtcctag

SEQ ID NO: 7898 - DNA, 334 bp, synthetic construct
  misc_feature 1..334: note = Synthetic construct
  source 1..334: mol_type = other DNA
cagtctgccctgactcagcctgcctccgtgtctgggtctcctggacagtcgatcaccatctcctgcactggaaccagtagtgacgttggtgcttataactatgtctcctggtaccaacaaaacccaggcaaagcccccaaactcatgatttatgatgtcagtaatcggccctcagggatttctaatcgcttctctggctccaagtctggcaacacggcctccctgaccatctctgggctccaggctgacgacgagggtgattattactgcacctcatatacaaacaacagcaattctcaggtattcggcggagggaccaagcggaccgtcctag

SEQ ID NO: 7899 - DNA, 322 bp, synthetic construct
  misc_feature 1..322: note = Synthetic construct
  source 1..322: mol_type = other DNA
gacatccagatgacccagtctccatcctccctgtcttcatctgtcggagacagagtcaccatcacttgccaggcgagtcagggcattgccaactatttaaattggtttcagcaaaaaccagggcaagcccctaagctcctgatctacgatgcttccactttggcaacaggcgccccatcaaggttcagtggaagtggatctgggacacattttactctcaccatcagcagactgcagcctgatgatattgcaacatactactgtcaacactatgatcatctccctctcactttcggcggagggaccaaggtggagatcagac

SEQ ID NO: 7900 - DNA, 325 bp, synthetic construct
  misc_feature 1..325: note = Synthetic construct
  source 1..325: mol_type = other DNA
gaagttgtgttgacgcagtctccaggcaccctgtctttgtctccaggggaaagagccaccctctcctgcagggccagtcagagtgttagcacctcctacttagcctggtaccagcagaaacccggccaggctcccaggctcctcatctatggtgcatacagcagggccgctggcatcccagagaggttccgtggcggcgggtctgggacagacttcactctcaccatcagcagactggagcctgaagattttgcagtctattactgtcagcagtatggtagctcaccgtggacgttcggccaagggaccaaggtggaagtcaaac

SEQ ID NO: 7901 - DNA, 340 bp, synthetic construct
  misc_feature 1..340: note = Synthetic construct
  source 1..340: mol_type = other DNA
gacatcgtgatgacccagtctccagactccctggctgtgtctctgggcgagagggccaccatcaactgcaagtccagccagagtgttttatacagctccaacaataggcattacttggcttggtaccagcagaaaccaggacagtctcctaaactgctcatttcctgggcatcttcccgggaatccggggtccctgaccgatttagtggcagcggatctgggacagatttcactctcaccatcagcagcctgcaggctgaagatgtggcactttattattgtcagcagtattatagtacttcgtggacgttcggccaagggaccaaggtggaaatcaaac

SEQ ID NO: 7902 - DNA, 322 bp, synthetic construct
  misc_feature 1..322: note = Synthetic construct
  source 1..322: mol_type = other DNA
aaaattgtgttgacgcagtctccagccaccctgtctttgtctccaggggaaagagccaccctctcctgcagggccagtcagagtcttaccaccaactacttggcctggtaccagcagaaacctggccaggctcccaggctcctcatctacgatacatccaacagggccactggcatccccgacaggttcactggcagtgggtctgggacagacttcactctcaccatcagcagactggagcctgacgattttgcagtgtattactgtcagcaatatggtaattcagggacgttcggcctagggaccaaggtggaaatcaaac

SEQ ID NO: 7903 - DNA, 322 bp, synthetic construct
  misc_feature 1..322: note = Synthetic construct
  source 1..322: mol_type = other DNA
gaaattgtgttgacgcagtctccaggcaccctgtctttgtctccaggggaaagagccaccctctcctgcagggccagtcaggctattagtagcagtaagttagcctggtatcaggaaaaacctggccaggttcccaggctcctcatctatgatgcatccagtagggccactggcatcccagacaggttcagtggcagtgggtctgggacagacttcactctcaccatcagcagactggagcctgacgattttgcagtgtattattgtcagcagtatggtggctcatccaccttcggccaagggacacgactggagattaaac

SEQ ID NO: 7904 - DNA, 325 bp, synthetic construct
  misc_feature 1..325: note = Synthetic construct
  source 1..325: mol_type = other DNA
gaaattgtgttgacacagtctccagccaccctgtctttgtctccaggggaaagagccaccctctcctgcagggccagtcagagtgttagcagctacttagcctggtaccaacagaaacctggccaggctcccaggctcctcatctatgatgcatccaacagggccactggcatcccagccaggttcagtggcagtgggtctgggacagacttcactctcaccatcagcagcctagagcctgaagattttgcagtttattactgtcagcagcgtagcaactggccttcgctcactttcggcggagggaccaaggtggagatcaaac

SEQ ID NO: 7905 - DNA, 328 bp, synthetic construct
  misc_feature 1..328: note = Synthetic construct
  source 1..328: mol_type = other DNA
tcttctgagctgactcaggaccctgctgtgtctgtggccttgggacagacagtcaggatcacatgccaaggagacagcctcagaagctattatgcaagctggtaccagcagaagccaggacaggcccctgtacttgtcatctatggtaaaaacaaccggccctcagggatcccagaccgattctctggctccagctcaggaaacacagcttccttgaccatcactggggctcaggcggaagatgaggctgactattactgtaactcccgggacagcagtggtaaccatctgggggtcttcggaactgggaccaaggtcaccgtcctag

SEQ ID NO: 7906 - DNA, 325 bp, synthetic construct
  misc_feature 1..325: note = Synthetic construct
  source 1..325: mol_type = other DNA
tcctatgtgctgactcagccaccctcggtgtcagtggccccaggacagacggccaggatgacgtgtgggggaaacaacattggaactaaaagtgtgcactggtaccagcagaagccaggccaggtccctgtgctggtcgtctatgatgatagcgaccggccctcagggatccctgagcgattctctggctccaactctgggaacacggccaccctgaccatcagcagggtcgaagccggggatgaggccgactattattgtcaggtgtgggatagtagtagtgatcatgtggtattcggcggagggaccaagctgaccgtcctag

SEQ ID NO: 7907 - DNA, 322 bp, synthetic construct
  misc_feature 1..322: note = Synthetic construct
  source 1..322: mol_type = other DNA
gaaatagtgatgacgcagtctccagccaccctgtctgtgtctccaggggaaagagccaccctctcgtgcagggccagtcagagtgttagtagcaacttagcctggcaccagcagaaacctggccaggctcccaggctcctcatctatggtgcatccaccagggccactggtatcccagccaggttcagtggcagtgggtctgggacagagttcactctcaccatcagtagcctgcagtctgaagattttgcagtttattactgtcagcagtataagagctggcccctcgcgttcggcggagggaccaaggtggagatcaaac

SEQ ID NO: 7908 - DNA, 331 bp, synthetic construct
  misc_feature 1..331: note = Synthetic construct
  source 1..331: mol_type = other DNA
cagtctgcgctgactcagtcaccctcagcgtctgagacccccgggcagagggtcaccatctcttgttctggaagcagctccaacatcggtactaaatatgtgtattggtatcagcagttcccaggaaaggccccccaactcctcatctttcggaataatcagcggccctcaggggtccctgaccgcttctctggctccaagtctggcacctcagcctccctggccatcagtgggctccggtccgaggatgaggctatttattactgtgcagcgtgggatgacaccctgagtgcttgggtgttcggcggagggaccaggctgaccgtcctag

SEQ ID NO: 7909 - DNA, 325 bp, synthetic construct
  misc_feature 1..325: note = Synthetic construct
  source 1..325: mol_type = other DNA
gaaattgtgttgacgcagtctccaggcaccctgtctttgtctccaggggaaagagccaccctctcctgcagggccagtcagagtgttagcagcacctacttagcctggtatcaacagaaacgtggccaggctcccaggctcctcatctatggtgcatccagcagggccactggcatcccagacaggttcagtggcagtgggtctgggacagacttcactctcaccatcagcagactggagcctgaagattttgcagtgtattactgtcagcagtatggtagctcacctcaaacgttcggccaagggaccaaggtggaaatcaaac

SEQ ID NO: 7910 - DNA, 325 bp, synthetic construct
  misc_feature 1..325: note = Synthetic construct
  source 1..325: mol_type = other DNA
gaaattgtgttgacacagtctccagccaccctgtctttgtctccaggggaaagagccaccctctcctgcagggccagtcagagtgttagcagctacttagcctggtaccaacagaaacctggccaggctcccaggctcctcatctatgatgcatccaacagggccactggcatcccagccaggttcagtggcagtgggtctgggacagacttcactctcaccatcagcagcctagagcctgaagattttgcagtttattactgtcagcagcgtagcaactggcctccgtggacgttcggccaagggaccaaggtggaaatcaaac

SEQ ID NO: 7911 - DNA, 340 bp, synthetic construct
  misc_feature 1..340: note = Synthetic construct
  source 1..340: mol_type = other DNA
gatattgtgatgacccagactccactctccctgcccgtcacccctggagagccggcctccatctcctgcaggtctagtcagagcctcttggatagtgatgatggaaacacctatttggactggtacctgcagaagccagggcagtctccacagctcctgatctatacgctttcctatcgggcctctggagtcccagacaggttcagtggcagtgggtcaggcactgatttcacactgaaaatcagcagggtggaggctgaggatgttggagtttattactgcatgcaacgtatagagtttccgtggacgttcggccaagggaccaaggtggaaatcaaac

SEQ ID NO: 7912 - DNA, 334 bp, synthetic construct
  misc_feature 1..334: note = Synthetic construct
  source 1..334: mol_type = other DNA
cagtctgtgctgactcagccaccctcagcgtctgggacccccgggcagagggtcaccatctcttgttctggaagcagctccaacatcggaagtaattatgtatactggtaccagcagctcccaggaacggcccccaaactcctcatctataggaataatcagcggccctcaggggtccctgaccgattctctggctccaagtctggcacctcagcctccctggccatcagtgggctccggtccgaggatgaggctgattattactgtgcagcatgggatgacagcctgagtggtcggggggtattcggcggagggaccaagctgaccgtcctag

SEQ ID NO: 7913 - DNA, 322 bp, synthetic construct
  misc_feature 1..322: note = Synthetic construct
  source 1..322: mol_type = other DNA
gacatccagatgacccagtctccatcctccctgtctgcatctgtaggagacagagtcaccatcacttgccgggcaagtcagagcattagcagctatttaaattggtatcagcagaaaccagggaaagcccctaagctcctgatctatgctgcatccagtttgcaaagtggggtcccatcaaggttcagtggcagtggatctgggacagatttcactctcaccatcagcagtctgcaacctgaagattttgcaacttactactgtcaacagagttacagtaccccgtacacttttggccaggggaccaagctggagatcaaac

SEQ ID NO: 7914 - DNA, 331 bp, synthetic construct
  misc_feature 1..331: note = Synthetic construct
  source 1..331: mol_type = other DNA
cagtctgccctgactcagcctcgctcagtgtccgggtctcctggacagtcagtcaccatctcctgcactggaaccagcagtgatgttggtggttataactatgtctcctggtaccaacagcacccaggcaaagcccccaaactcatgatttatgatgtcagtaagcggccctcaggggtccctgatcgcttctctggctccaagtctggcaacacggcctccctgaccatctctgggctccaggctgaggatgaggctgattattactgctgctcatatgcaggcagctacacttgggtgttcggcggagggaccaagctgaccgtcctag

SEQ ID NO: 7915 - DNA, 322 bp, synthetic construct
  misc_feature 1..322: note = Synthetic construct
  source 1..322: mol_type = other DNA
gccatccagatgacccagtctccatcctccctgtctgcatctgttggagacagagtcaccatcacttgccgggcaagtcaggacattagaaatgatttaggctggtatcagcagaaaccagggcaggcccctaagttcctgatctctggtgcctctcatttacaaagtggggtcccatcaaggtttagcggcagtggatctggcacagatttcactctcaccatcagcatcctgcggcctgaagattttgcaacgtattactgtgtacaggattacgattaccctcatacattcggccaagggaccaaggtggaaatcaaac

SEQ ID NO: 7916 - DNA, 93 bp, synthetic construct
  misc_feature 1..93: note = Synthetic construct
  source 1..93: mol_type = other DNA
aggctgacgacgaggctgattttcagtgcacctcatatacaaacgacagcaattctcaggtcttcggcggagggaccaagctgaccgtcctag

SEQ ID NO: 7917 - DNA, 325 bp, synthetic construct
  misc_feature 1..325: note = Synthetic construct
  source 1..325: mol_type = other DNA
tcctctgaactgacacagccaccctcggtgtcactgtccccaggacagacggccaggatcacctgctctggagatgaattgccagaccaatttgtctattggtaccagcagaagccgggccgggcccctatcttggtaatctataaggacactgcgaggccctcaggcatccctgcccgattctctggctccggctcagggacaacagctacattgaccatcagtggagtccaggcagaagacgaggctgattattactgtcaatcagtaggcactaatcatctttctgtggtcttcggcggcgggaccaggctgaccgtcctga

SEQ ID NO: 7918 - DNA, 334 bp, synthetic construct
  misc_feature 1..334: note = Synthetic construct
  source 1..334: mol_type = other DNA
cagtctgccctgactcagcctccctccgcgtccgggtctcctggacagtcagtcaccatctcctgcactggaaccagcagtgacgttggtgggtataactatgtctcctggtaccaacagcacccaggcaaagcccccaaactcatgatttatgaggtcagtaagcggccctcaggggtccctgatcgcttctctggctccaagtctggcaacacggcctccctgaccgtctctgggctccaggctgaggatgaggctgattattactgcacctcatatgcaggcagcaacaatttcagggtcttcggaagtgggaccaaggtcaccgttgtag

SEQ ID NO: 7919 - DNA, 104 bp, synthetic construct
  misc_feature 1..104: note = Synthetic construct
  source 1..104: mol_type = other DNA
caccgacctccaaactggggacgaggccgactattactgcgccgcttgggatgaccacctgcgaattgtgggtttcggcggggggaccaagctgaccgtcctag

SEQ ID NO: 7920 - DNA, 337 bp, synthetic construct
  misc_feature 1..337: note = Synthetic construct
  source 1..337: mol_type = other DNA
agttttattctgactcagccgcactctgtgtcggagtctccggggaaggcggtgaccatctcctgttcccgcagcagcggcagcattaccagcagctttgtgcagtggtaccagcagcgcccgggcagtgcccccaccactgtgatctatgaggataaccaaaggccctctggggtccccgatcgcttctctgcctccgtcgacggctcctccaactctgcctccctcaccatctctggactgcagactgaggacgaggctgactactactgtcaatcttatgataccaccacggatcatgcagtcttcggaggaggcacccacctgaccgtcctcg

SEQ ID NO: 7921 - DNA, 322 bp, synthetic construct
  misc_feature 1..322: note = Synthetic construct
  source 1..322: mol_type = other DNA
gacatccagatgacccagtctccatcctccctgtctgcatctgtgggagacagagtcaccatcacctgccgggcgagtcagggctttagtaattctttagcctggtatcagcagaaaccagggaaagcccctaaggtcctactctatactgcatccagattggaaagtggggtcccatccaggttcagtggcagtggatctgggacggattacactctcaccatcagcagcctgcagcctgaagattttgcaacttattactgtcaacagtatcatagtaccccgtggacgttcggccaagggaccaaggtggaaatcaaac

SEQ ID NO: 7922 - DNA, 322 bp, synthetic construct
  misc_feature 1..322: note = Synthetic construct
  source 1..322: mol_type = other DNA
gacatccagatgacccagtctccatcctccctgtctgcatctgtaggagacagagtcaccatcacttgccgggcaagtcagggcattaacattgatttagcctggtatcagcagaaaccagggaatccccctaagcgcctgatctttgctgcatcctttttgaaaagtggagtcccatcaaggttcagcggcagtggatctgggacagaattcactctcacaatcaacagcctgcagcctgaagattttgcaacttatttctgtctacaacataatagttaccctcgaacgttcggccaagggaccaaggtggaaatcaaac

SEQ ID NO: 7923 - DNA, 322 bp, synthetic construct
  misc_feature 1..322: note = Synthetic construct
  source 1..322: mol_type = other DNA
gacatccagatgacccagtctccttccaccctgtctgcatctgcaggagacagagtcaccatcacttgccgggccagtcagagtattagtagttggttggcctggtatcagcagaaaccagggaaagcccctaaactcctcatctataaggcgtctagtttagaaagtggggtcccatcaaggttcagcggcagtggatctgggacagaattcactctcaccatcagcagcctgcagcctgatgactttgcaacttattactgccaacagtatagtactgattcggcgacgttcggccaagggaccaaggtggaaatcaaac

SEQ ID NO: 7924 - DNA, 337 bp, synthetic construct
  misc_feature 1..337: note = Synthetic construct
  source 1..337: mol_type = other DNA
cagtctgtactgacgcagccgccctcagtgtctggggccccagggcagagggtcaccatctcctgcactgggagcagctccaacatcggggcaggttatgatgtacactggtaccagcagcttccagggacagcccccaaactcctcatctttgggaacgacaatcggccctcaggggtccctgaccgattctctggctccaagtctggcacctcagcctccctggccatcactgggctccaggctgaggatgaggctgattattactgccagtcctatgacagtagcctgagtgattcgaaagtattcggcggggggaccaagctgaccgtcctgg

SEQ ID NO: 7925 - DNA, 340 bp, synthetic construct
  misc_feature 1..340: note = Synthetic construct
  source 1..340: mol_type = other DNA
gacatcgtgatgacccagtctccagactccctggctgtgtctctgggcgagagggccaccctcaactgcacgtccagtcagagtgtcttatacagctccaacaataagaactacttagcttggtaccagcagaaaccaggacagcctcctaatttgctcatttactgggcatctacgcgggaagccggggtccctgaccgattcagtggcagcgggtctgggacagatttcactctcaccatcagcagcctgcaggctgaagatgtggcagtttattactgtcagcaatcttatactagtcctgtcactttcggcggagggaccaaggtggagatccaac

SEQ ID NO: 7926 - DNA, 325 bp, synthetic construct
  misc_feature 1..325: note = Synthetic construct
  source 1..325: mol_type = other DNA
gaaattgtgttggcgcagtctccaggctccctgactttgtctccaggggaaagagccaccctctcctgcagggccagtcagagtgttaacagtaactatttagcctggtaccagcagaagtctggccaggctcccaggctcctcatctatggtgcgtccaacagggccactggcatcccagacaggttcagtggcagtgggtctgggacagacttcagtctcaccatcagccgactggagccggaagattttgcaatgtattactgtcagcagtatgcttcctcaccggtcactttcggcggagggaccaaggtggagatcaaac

SEQ ID NO: 7927 - DNA, 213 bp, synthetic construct
  misc_feature 1..213: note = Synthetic construct
  source 1..213: mol_type = other DNA
acccaggcaaagcccccaaagtcttgatttatgagggcagtaagcggccctcaggggtttctaatcgcttctctggctccaagtctggcaacacggcctccctgaccatctctgggctccaggctgacgacgaggctgattattactgcacctcatatacaaacgacagcaattctcaggtattcggcggagggaccaagctgaccgtcctag

SEQ ID NO: 7928 - DNA, 322 bp, synthetic construct
  misc_feature 1..322: note = Synthetic construct
  source 1..322: mol_type = other DNA
gacatccagatgacccagtctccttccaccctgtctgcttctgtgggagacagactcaccatcacttgccgggccagtcagagtattggtacttggttggcctggtatcagcaaaaaccagggaaagcccctaacctcctgatctataaggcgtctagtttgcaaaatggcgtcccatcgaggttcagaggcagtggatctgagacagagttcactctcaccatcagcaacctgcagcctgatgattctgcaacttattactgccaacactgtgatagttatccgtggacgttcggccaagggaccaaggtggaaatcaaac

SEQ ID NO: 7929 - DNA, 319 bp, synthetic construct
  misc_feature 1..319: note = Synthetic construct
  source 1..319: mol_type = other DNA
tcctatgaactgacacagccatcctcagtgtcagtgtctccgggacagacagccaggatcacctgctcaggagatgtgttggcaaaaaaatattctcggtggttccagcagaagccaggccaggcccctgtgctggtgatttataaagacagtgagcggccctcagggatccctgagcgattctccggctccagctcagggaccacagtcaccttgaccatcagcggggcccaggttgaggatgaggctgactattactgttactctgcggctgacaacaatcgagtcttcggaactgggaccaaggtcaccgtcctag

SEQ ID NO: 7930 - DNA, 325 bp, synthetic construct
  misc_feature 1..325: note = Synthetic construct
  source 1..325: mol_type = other DNA
tccttagtgctgactcaacaacccacagtgtcagtggcccccggaaagacggccaccataacctgtggggggaccagaatggggactaggcttgtacactggtaccaacagaagccaggccaggcccctgtcgtgctcctctataatgacagcgaccggccctcagggatccctgaacgtttctccggctccaattctgagactatggccaccctgaccatcgactgggtcgaggccggggatgaggccgactatttctgtcaggcgtgggatgttgatagtgatcaaatggttttcggcggcgggaccaagttgaccgtcctag

SEQ ID NO: 7931 - DNA, 322 bp, synthetic construct
  misc_feature 1..322: note = Synthetic construct
  source 1..322: mol_type = other DNA
gacattatgttgacgcagtctccaggcaccctgtctttgtctccaggggaaagagtcaccctctcctgcagggccagtcagagtgtgagcaacaactacttagcctggtacatcctgaaacctggccagactcccaggctcctcatctttggtgcatccagcagggccactggcatcccagacaggttcagtggcagtgggtctgggacagacttcacgctcaccatcagcagactggagcctgaggattttgcagtgtatttctgtcagcagtatgctacctcaccgacttttggccaggggaccaagctggagatcaaac

SEQ ID NO: 7932 - DNA, 325 bp, synthetic construct
  misc_feature 1..325: note = Synthetic construct
  source 1..325: mol_type = other DNA
gaaatagtgatgacgcagtctccagccatcctgtctgtgtctccaggggacagagccaccctctcctgcagggccagtcagagtattaggagtgacttggcctggtaccagcagaaacttggccagcctcccaggctcctcatctttggtgcatccaccagggccactggtgtcccagacaggttcagtggcagtgggtctgggacagagttcactctcaccatcagcagcctgcagtctgaagattttgcagtttattactgtcagcagtattataactggcctccgcacacttttggccaggggaccaagctggacatcaaac

SEQ ID NO: 7933 - DNA, 322 bp, synthetic construct
  misc_feature 1..322: note = Synthetic construct
  source 1..322: mol_type = other DNA
gacatccagatgacccagtctccatcctccgtgtctgcttctgtaggagacagagtcaccatcacttgccgggcgagtcaggccattagcaatgatttagcctggtatcagcagaaaccagggcagggtcctgaactcctcatctattctgcatccattctgcaggcaggggtctcatcgcgtttcagcggcagtggatctgggacaaatttcactctctccataagaaacctggagcctgaggatgttggcacttattactgtctgcggtgtaacggtttccctctcactttcggccctgggaccagagtggatatcaaac

SEQ ID NO: 7934 - DNA, 328 bp, synthetic construct
  misc_feature 1..328: note = Synthetic construct
  source 1..328: mol_type = other DNA
gaaattgtgttgacgcagtctccaggcaccctgtctttgtctccaggggaaagagccaccctctcctgcagggccagtcagagtattagtggtacctacttagcctggtaccagcagaaacctggccaggctcccaggcttctcatttatggtgcatccagcagggccactggcatcccagacaggttcagtggcagtgggtctgggacagacttcactctcaccatcagcagactggagcctgaagattttgcagtgttttactgtcagcactatcctatgtcacctccgatcaccttcggccaagggacacgactggagattaaac

SEQ ID NO: 7935 - DNA, 319 bp, synthetic construct
  misc_feature 1..319: note = Synthetic construct
  source 1..319: mol_type = other DNA
gacatccagatgacccagtctccttccaccctgtctgcatctgtaggagaaagagtcaccatcacttgccgggccagccagagtattagtacctggttggcctggtatcagcacaagccagggaaagcccctaggctcatgatctatagggcgtctagtttagaaagtggggtcccatcaaggttcagcggcagcggatctgggacagaattcactctcaccatcagcagcctgcagcctgatgattttgcaacttattactgccaacagtatcagagttattcgactttcggcggagggaccaaggtggagatcaaac

SEQ ID NO: 7936 - DNA, 331 bp, synthetic construct
  misc_feature 1..331: note = Synthetic construct
  source 1..331: mol_type = other DNA
cagtctgtgctgactcagccaccctcagcatctgggacccccgggcagaggatcaccatctcttgttctggcagcagttccaacatcggaagtaacgctgtaaactggtaccagcagctcccaggaacgccccccaaactcctcatgttttctgataatcagcggccctcaggggtccctgaccgaatctctggctccaagtctggcacctcagcctccctggccatcagtggactccagtctgaggatgaggctgattattactgtgcagcatgggatgacaccctgcatggtgtggttttcggcggagggaccaagttgaccgtcctcg

SEQ ID NO: 7937 - DNA, 319 bp, synthetic construct
  misc_feature 1..319: note = Synthetic construct
  source 1..319: mol_type = other DNA
tcctatgagctgacacagccatcctcagtgtccgtgtctccgggacagacagccaggatcacctgttcaggagatgtactggcaaaaaaacatgctcggtggttccagcaaaagccaggccaggcccctgtattggtgatttctaaagacagtgagcggccctcagggatccctgagcgattctccggctccagctcagggaccacagtcaccttgaccatcagccgggcccaggttgaggatgaggctgactattactgttactctgcggctgacaagagtctggtattcggcggagggaccaagctgaccgtcctac

SEQ ID NO: 7938 - DNA, 328 bp, synthetic construct
  misc_feature 1..328: note = Synthetic construct
  source 1..328: mol_type = other DNA
tcctatgagctgacacagccaccctcggtgtcagtgtccccaggacagacggccaggatcccctgctctggaggtgctttgccaaagcaatatgcttattggtaccagcggaagccaggccaggcccctcgactggtgatctatcaagacagtgagaggccctcagggatccctgagcgattctctggctccaattcagggacaacagtgacgttgaccatcactggagtccaggcagaagacgaggctgactattactgtcaatccgcagacagtagtggttcttatcctgtggttttcggcggagggaccaaactgaccgtcctag

SEQ ID NO: 7939 - DNA, 331 bp, synthetic construct
  misc_feature 1..331: note = Synthetic construct
  source 1..331: mol_type = other DNA
cagtctgccctgactcagcctccctccgcgtccgggtctcctggacagtcagtcaccatctcctgcactggaaccagcagtgacgttggtgactataagtatgtctcctggtaccaacaacacccaggcaaagcccccaaactcatgatttatgaggtcaataagcggccctcaggggtccctgatcgcttctctggctccaagtctggcaacacggcctccctgaccgtctctggcctccaggctgaagatgagggtgattattactgcagctcattggaaggcaggaacaattgggtgttcggcggagggaccaaactgaccgtcctag

SEQ ID NO: 7940 - DNA, 322 bp, synthetic construct
  misc_feature 1..322: note = Synthetic construct
  source 1..322: mol_type = other DNA
gacatccagatgacccagtctccttccaccctgtctgcatctgtcggagacagagtcaccatcacttgccgggccagtcagagtattaatagttggttggcctggtatcagcagaaagcagggcaagcccctaagctcctgatctatcaggcgtctactttagaaaaaggggtcccatcacggttcagcggcagtggatctgggacagaattcactctcaccattagcagtctgcagcctgatgattttgcaacttacttctgtcaacagtataagagttacaagtggacgttcggccaggggaccagggtggatatcaagc

SEQ ID NO: 7941 - DNA, 337 bp, synthetic construct
  misc_feature 1..337: note = Synthetic construct
  source 1..337: mol_type = other DNA
cagtctgtgctgacgcagccgccctcagtgtctggggccccagggcacaaggtcaccatctcctgcactgggagcggctccaacatcggggctcctcatgatgtaaactggtaccaacaacttccaggagaagtccccaaactcctcatttatggcaacaacaatcggccctcaggggtccctgaccgattctctggctccaagtctggcacctcagcctccctgataatcactgggctccagactgaggatgaggctgtttattattgccagtcctttgacaacagtgtgggtgtccaagtgattttcggcggagggaccacgctgaccgtcctag

SEQ ID NO: 7942 - DNA, 337 bp, synthetic construct
  misc_feature 1..337: note = Synthetic construct
  source 1..337: mol_type = other DNA
gaaattgtgatgactcagtctccactctccctgcccgtcgcccctggagagccggcctccatctcctgcacgtctagtcagagcctcctggaagtaaatggaaacacctatttagattggtacctggtgaagcctggacagcctccacaactcctcatttacttaacttctactcgggcctccggggtccctgacaggttcattggcactggatcaggcattgattttacactgaaaatcaccagggtgcaacctgaagatgttggggtgtattactgcatgcagcatctaaaaattcctcggacttttggccaggggaccaagctggagatcagac

SEQ ID NO: 7943 - DNA, 331 bp, synthetic construct
  misc_feature 1..331: note = Synthetic construct
  source 1..331: mol_type = other DNA
gaaattgtgttgacgcagtctccaggcaccctgtctttgtctccaggggaaactgccaccctctcctgcagggccagtcggagtgtttacagcaactacttggcctggtaccaacagaaacctggccagcctcccaggctcctcatctatggtatttccaacagggccactggcatcccagacaggttcagaggcagtgggtctgggacagacttcactctcaccatcagcagactggagcctgaagattttgcagtgtattactgtcagcagtatagtggctcacttcccccatacacttttggccaggggaccaaggtggagatcagcc

SEQ ID NO: 7944 - DNA, 331 bp, synthetic construct
  misc_feature 1..331: note = Synthetic construct
  source 1..331: mol_type = other DNA
aattttatgctgactcagccccactctgtgtcggagtctccggggaagacggtaaccatctcctgcacccgcagcagtggcagcattgccagcaactatgtgcagtggtaccagcagcgcccgggcagtgcccccaccactgtgatctatgaggataaccaaagaccctctggggtccctgatcggttctctggctccatcgacagctcctccaactctgcctccctcaccatctctggactgaagactgaggacgaggctgactactactgtcagtcttatgatggcagcaatcagttattcggcggagggaccaagctgaccgtcctac

SEQ ID NO: 7945 - DNA, 328 bp, synthetic construct
  misc_feature 1..328: note = Synthetic construct
  source 1..328: mol_type = other DNA
gacatccagatgacccagtctccttccaccctgtctgcatctgtgggagacagagtcaccatcacttgccgggccagtcagagtcttagtgactggttggcctggtatcagcagaaaccagggaaagcccctaaactcctgatctataaggcatctactttagaaagtggggtcccatcaaggttcagcggcagtggatctgggacagaattcactctcacgatcagcagcctgcagcctgatgattttgcatcttattactgccaacagtataatacttactctcccacgtgggcattcggccaagggaccaaggtggaaatcaaac

SEQ ID NO: 7946 - DNA, 322 bp, synthetic construct
  misc_feature 1..322: note = Synthetic construct
  source 1..322: mol_type = other DNA
gacatccagatgacccagtctccttccaccctgtctgcatctgtaggagacagagtcaccatcacttgccgggccagtcagagtattagtgtctggttggcctggtatcagcagagaccagggaaagcccctaagctcctgatctataaggcgtctaatttagaaagtggggtcccatcaagattcagcggcagtggatctgggacagaattcactctcaccatcagcagcctgcagcctgatgattttgcaacttattactgccaacactataatagttacccgtacacttttggccaggggaccaagttggagatcaaac

SEQ ID NO: 7947 - DNA, 322 bp, synthetic construct
  misc_feature 1..322: note = Synthetic construct
  source 1..322: mol_type = other DNA
tcctatgacctgagtcagccaccctcagtgtccgtgtccccacgacagacagccaacatcacctgctctggacatgaattgggggataaatttgcttcctggtatcaacagaagccaggccagtcccctgttctggtcatctatcaagataccaagcggccctcagggatccctgaccgattctctggctccaactctggaaacacagccactctgaccatcagcgggacccaggctatggatgaggctgactattactgtcaggcgtgggacagcaacacttttgtgatgttcggcggagggaccaagctgaccgtcctag

SEQ ID NO: 7948 - DNA, 325 bp, synthetic construct
  misc_feature 1..325: note = Synthetic construct
  source 1..325: mol_type = other DNA
gaaatagtgatgacgcagtctccagccaccctgtctgtgtctccagggggaagagccaccctcacctgcacggccactgtgagtgttaacagcaacttagcctggtaccagcagaaacctggccaggctcccaggctcctcatttatggtgcatccaccagggccactggtgtcccagcccggttcagtggcactgggtctgggacagagttcttgctcaccatcaccagcctgcagtctgaagatttcgcagtttattattgtcaacaatataatgactggcctccggtcactttcggcggagggaccaaggtggagatcaaac

SEQ ID NO: 7949 - DNA, 322 bp, synthetic construct
  misc_feature 1..322: note = Synthetic construct
  source 1..322: mol_type = other DNA
caaattgtgttgacgcagtctccaggcaccctgtctttgtctccaggggaaagagccaccctctcctgcagggccagtcacactgttaccgccgactacttagcctggtaccaccacaaacctggccaggctcccaggctcctcatctatggtacatccagcagggccgctggcatcccagacaggttcagtggcagtgggtctggggcagacttcgctctcaccatcaccagactggagcctgaagattttggggtgtattactgtcagcaatatggtagctcacccactttcggcggagggaccaaggtcgagatcaaac

SEQ ID NO: 7950 - DNA, 340 bp, synthetic construct
  misc_feature 1..340: note = Synthetic construct
  source 1..340: mol_type = other DNA
gacatcgtgatgacccagtccccagactccctggctgtgtctctgggcgcgagggccaccatcaactgcaagtctagtcagagagtctccgagggcgccaacaattacaaatacgtcgcttggtaccagcacaaaacagggcagcctcctaagttgctcatttactgggcgtctgcccgggagtccggggtccctgcccgatttagtgccagcgcctctgggacagatttcactctcaccatcgacagcctgcaggctgaggatgtggccgtttattactgtcagcagtattttcgtagtcctcacacgttcggccaagggaccaaggtggaaatcaacc

SEQ ID NO: 7951 - DNA, 337 bp, synthetic construct
  misc_feature 1..337: note = Synthetic construct
  source 1..337: mol_type = other DNA
gatgttgtggtcactcagtctccactttccctgcccgtcatccttggacagccggcctccatctcctgcaggtccagtcacagcctcctccaccatgataggaaaaccttcttgagttggtttcaccagaggccaggccagtctccacggcgcctcatttatgaggtttttaaccgggactctggggtcccagacagattcagcggcagtggggcaggctctgagttcacgctgacaatcagtagcgtggaggtcgaggatgttggcatttattactgcatgcaagggacacactggcctctgacttttggccaggggacgaaactggagatcaagc

SEQ ID NO: 7952 - DNA, 322 bp, synthetic construct
  misc_feature 1..322: note = Synthetic construct
  source 1..322: mol_type = other DNA
gacatccagatgacccagtctccatcctccctgtctgcatctgtaggagacagagtcaccatcacttgccaggcgagccagggcattagcacctatttaaattggtatcagcagaaaccagggaaagcccctaagctcctgatctatgatgcatccactttggagacaggggtcccatcaaggatcagtggaactggatctgggacaacttttactttcaccatcaccagcctgcagcctgaagatattgcaacatattactgtcaacagtataatagtctcccgtggacgttcggccaggggaccaaggtggaaatcaaac

SEQ ID NO: 7953 - DNA, 328 bp, synthetic construct
  misc_feature 1..328: note = Synthetic construct
  source 1..328: mol_type = other DNA
gaaattgtgttgacgcagtctccaggcaccctgtctttgtctccaggggaaagagccaccctctcctgcagggccagtcagagtattaacagcaactacttagcctggtaccagcagaaacctggccaggctcccaggctcctcatctatggtgcatccagcagggcccctggcatcccagagaggttcagtgtcagtgggtctgggacagatttcactctcaccatcagcagtctggagcctgaagattttgcagtgtattactgtcagcaatttggtggctcccctctgtacacttttggccaggggaccatactggagatcaaac

SEQ ID NO: 7954 - DNA, 325 bp, synthetic construct
  misc_feature 1..325: note = Synthetic construct
  source 1..325: mol_type = other DNA
gaaatagtcatgacgcagtctccagccaccctgtctgtgtctccaggggaaagagccaccctctcctgcagggccagtcagagtgttggcggcaacttagcctggtaccagcaaaaacctggccaggctcccaggctcctcatccacgatgcatccaccagggccactggtatcccagccaggttcagtggcagtgggtctgggacagagttcactctcaccatcagcagcctgcagtctgaagattttgcagtttattactgtcagcagtattatgactggcctccgtggacgttcggccaagggaccaaggtggaaatcaaac

SEQ ID NO: 7955 - DNA, 334 bp, synthetic construct
  misc_feature 1..334: note = Synthetic construct
  source 1..334: mol_type = other DNA
cagtctgtgcttattcagccaccctcagcgtctgggacccccgggcagagggtctccatcccttgctctgggagcaggtcccacttcgccataaattttgttctgtggtatcaacaattcccaggagtggcccccaaactcctcatctacagcaatgatcagcggccctcagatgtctctgaccgattctctggctctaagtctggcaactcagcctccctgaccatcagtggactccggtccgaggatgaggcagactattattgtgttgcatgggatgtcaatctgagtggtcctgtgctcatcggcggcgggaccaagctgaccgtcctag

SEQ ID NO: 7956 - DNA, 325 bp, synthetic construct
  misc_feature 1..325: note = Synthetic construct
  source 1..325: mol_type = other DNA
ggcatcctgttgacccagtctccaccgtccctgtctgcatccgagggagacagagtcaccatcacttgccgggcaaatcagaccatcgctacttctttaaattggtatcaacaaaaagcagggaaagcccctaagctcctgatctctgccgcctccactttgcaaagtcatgtcccatctagattcagtggcagtggatccgggacagatttcactttcaccatcagcagtctgcaacctgaagattttgcgacatattactgtcaacagagttacagtaccctcgcggtcactttcggcggggggaccaaggtggacgtcaagc

SEQ ID NO: 7957 - DNA, 331 bp, synthetic construct
  misc_feature 1..331: note = Synthetic construct
  source 1..331: mol_type = other DNA
cagactgtggtgacccaggagccatcgttctcagtgtcccctggagggacagtcacactcacttgtggcttgacctctgactcagtctctacttcttactaccccagctggtaccagcagaccccaggccaggctccacgcacgctcatctacagcacaaacactcgctcttctggggtccctgatcgcttctctggctccatccttggaaacaaagctgccctcaccatcacgggggcccaggcagatgatgaatctgattattactgtcttctctatatgggtactggctcttgggtgttcggcggagggaccaaggtgaccgtcctag

SEQ ID NO: 7958 - DNA, 325 bp, synthetic construct
  misc_feature 1..325: note = Synthetic construct
  source 1..325: mol_type = other DNA
gaaattgtgttgacgcagtctccaggcaccctgtctttgtctccaggggaaagagccaccctctcctgcagggccagtcagagtgttcgcagcacctacttagcctggtaccagcagaaacctggccaggctcccaggctcctcatctatggtgcatccagcagggccactggcatcccagacaggttcagtggcagtgggtctgggacagacttcgctctcaccatcaacagactggagcctgaggattttgcagtgtattactgtcagcagtatgttagttcacccctgacgttcggccaagggaccaaggtggaaatcaaac

SEQ ID NO: 7959 - DNA, 325 bp, synthetic construct
  misc_feature 1..325: note = Synthetic construct
  source 1..325: mol_type = other DNA
gaaattgtgttgacgcagtctccaggcaccctgtctttgtctccaggggaaagcgccaccctctcctgcagggccagtcagagtattagcagcagttatttagcctggtaccagcagaaacctggccaggctcccaggctcctcatctatggtgcatccagcagggccactggcatcccagacaggttcagtggcagtgggtctgggacagacttcactctcaccatcagcagactggagcctgaagattttgcagtgtatttctgtcaccagtatggtagttcagcgaggacttttggccaggggaccaacctggagatcaaac

SEQ ID NO: 7960 - DNA, 322 bp, synthetic construct
  misc_feature 1..322: note = Synthetic construct
  source 1..322: mol_type = other DNA
gacatccagatgacccagtctccttccaccctgtctgcatctgtcggagacagagtcaccatcacttgccgggccagtcagagtattagtgactggttggcctggtatcagcagaaaccagggaaagcccctaacctcctaatttatagggcatctactttaaaaagtggggtcccgtcaaggttcagcggcagtggatctgggacagacttcactctcaccatcagcagcctgcagcctgatgattttgcaacttattactgccaacactatgatagatattcagcgacgttcggccaagggaccaaggtggaaatcaaac

SEQ ID NO: 7961 - DNA, 308 bp, synthetic construct
  misc_feature 1..308: note = Synthetic construct
  source 1..308: mol_type = other DNA
gaaattgtgttgacgcagtctccaggcaccctgtctttgtctccagggggaagagccggtctctcctgtagggccagtcagagtgtttctaacgactacttagcctggtaccagcagagacctggccaggctcccaggctcctcatctatggtgcttccaccagggccactggcatcccagacaggttcggtggcagcgggtctgggacagacttcacgctcaccatcagcagactggagcctgaagattttgcagtctatttctgtcaacagtatggcagttcgcctcagacgttcggccaagggac

SEQ ID NO: 7962 - DNA, 319 bp, synthetic construct
  misc_feature 1..319: note = Synthetic construct
  source 1..319: mol_type = other DNA
gaaattgtgctgactcagtctccagactttcaggctgtgactccaaaggagaaagtcaccatcacctgccgggccagtcagagcattggtagtaacttacactggtaccagcagaaaccagatcagtctccaaagctcctcatcaagcatgcttcccagtccttctcaggggtcccctcgaggttcagtggcagtggatctgggacagatttcaccctcaccatcaatagcttggaagctgaagatgctgcaacgtattactgtcatcagagtagtagttggtacacttttggccaggggaccaagctggagatcaaac

SEQ ID NO: 7963 - DNA, 328 bp, synthetic construct
  misc_feature 1..328: note = Synthetic construct
  source 1..328: mol_type = other DNA
gaaattgtgttgacacagtctccaggcaccctgtctttgtctccaggggaaagagccaccctctcctgcagggccagtcagagtgttggcatctacttagcctggtatcaacaaaaacctggccaggctcccaggctcctcatctctgatgcattcaccagggccgctggcatcccagccaggtttagtggcagtgggtctgggacacacttcactctcaccatcagcagcctagagcctgaagattttggagtttattactgtcagcagcggagcaatgggcgtccgagggtcactttcggcggagggaccaaggtggagatcaaac

SEQ ID NO: 7964 - DNA, 322 bp, synthetic construct
  misc_feature 1..322: note = Synthetic construct
  source 1..322: mol_type = other DNA
gccatccagatgacccagtctccatcctccctgtctgcatctgtaggagacagagtcaccatcacttgccgggcaagtcagggcattagaaatgatttaggctggtatcagcagaaaccagggaaagcccctaagctcctgatctatgctgcatccagtttacaaagtggggtcccatcaaggttcagcggcagtggatctggcacagatttcactctcaccatcagcagcctgcagcctgaagattttgcaacttattactgtctacaagattacaattacccctggaagttcggccaagggaccaaggtggaaatcaaac

SEQ ID NO: 7965 - DNA, 322 bp, synthetic construct
  misc_feature 1..322: note = Synthetic construct
  source 1..322: mol_type = other DNA
gacatccagatgacccagtctccatcctccctgtctgcatctgtaggagacagagtcaccatcacttgccgggcaagtcagagcattagcagctatttaaattggtatcagcagaaaccagggaaagcccctaagctcctgatctatgctgcatccagtttgcaaagtggggtcccatcaaggttcagtggcagtggatctgggacagatttcactctcaccatcagcagtctgcaacctgaagattttgcaacttactactgtcaacagagttacagtaccccgtggacgttcggccaagggaccaaggtggaaatcaaac

SEQ ID NO: 7966 - DNA, 322 bp, synthetic construct
  misc_feature 1..322: note = Synthetic construct
  source 1..322: mol_type = other DNA
gaaattgtgttgacgcagtctccaggcaccctgtctttgtctccaggggaaagagccaccctctcctgcagggccagtcagagtgttagcagcagctacttagcctggtaccagcagaaacctggccaggctcccaggctcctcatctatggtgcatccagcagggccactggcatcccagacaggttcagtggcagtgggtctgggacagacttcactctcaccatcagcagactggagcctgaagattttgcagtgtattactgtcagcagtatggtagctcaccaacgttcggccaagggaccaaggtggaaatcaaac

SEQ ID NO: 7967 - DNA, 337 bp, synthetic construct
  misc_feature 1..337: note = Synthetic construct
  source 1..337: mol_type = other DNA
gatattgtgatgacccagactccactctcctcacctgtcacccttggacagccggcctccatctcctgcaggtctagtcaaagcctcgtacacagtgatggaaacacctacttgagttggcttcagcagaggccaggccagcctccaagactcctaatttataagatttctaaccggttctctggggtcccagacagattcagtggcagtggggcagggacagatttcacactgaaaatcagcagggtggaagctgaggatgtcggggtttattactgcatgcaagctacacaatttcctcagacgttcggccaagggaccaaggtggaaatcaaac

SEQ ID NO: 7968 - DNA, 340 bp, synthetic construct
  misc_feature 1..340: note = Synthetic construct
  source 1..340: mol_type = other DNA
gacatcgtgatgacccagtctccagactccctggctgtgtctctgggcgagagggccaccatcaactgcaagtccagccagagtgttttatacagctccaacaataagaactacttagcttggtaccagcagaaaccaggacagcctcctaagctgctcatttactgggcatctacccgggaatccggggtccctgaccgattcagtggcagcgggtctgggacagatttcactctcaccatcagcagcctgcaggctgaagatgtggcagtttattactgtcagcaatattatagtactccgtacacttttggccaggggaccaagctggagatcaaac

SEQ ID NO: 7969 - DNA, 325 bp, synthetic construct
  misc_feature 1..325: note = Synthetic construct
  source 1..325: mol_type = other DNA
gaaatagtgatgacgcagtctccagccaccctgtctgtgtctccaggggaaagagccaccctctcctgcagggccagtcagagtgttagcagcaacttagcctggtaccagcagaaacctggccaggctcccaggctcctcatctatggtgcatccaccagggccactggtatcccagccaggttcagtggcagtgggtctgggacagagttcactctcaccatcagcagcctgcagtctgaagattttgcagtttattactgtcagcagtataataactggcctacgtacacttttggccaggggaccaagctggagatcaaac

SEQ ID NO: 7970 - DNA, 325 bp, synthetic construct
  misc_feature 1..325: note = Synthetic construct
  source 1..325: mol_type = other DNA
tcctatgagctgacacagccaccctcggtgtcagtgtccccaggacagacggccaggatcacctgctctggagatgcattgccaaagcaatatgcttattggtaccagcagaagccaggccaggcccctgtgctggtgatatataaagacagtgagaggccctcagggatccctgagcgattctctggctccagctcagggacaacagtcacgttgaccatcagtggagtccaggcagaagacgaggctgactattactgtcaatcagcagacagcagtggtacttatgtggtattcggcggagggaccaagctgaccgtcctag

SEQ ID NO: 7971 - DNA, 331 bp, synthetic construct
  misc_feature 1..331: note = Synthetic construct
  source 1..331: mol_type = other DNA
cagtctgccctgactcagcctcgctcagtgtccgggtctcctggacagtcagtcaccatctcctgcactggaaccagcagtgatgttggtggttataactatgtctcctggtaccaacagcacccaggcaaagcccccaaactcatgatttatgatgtcagtaagcggccctcaggggtccctgatcgcttctctggctccaagtctggcaacacggcctccctgaccatctctgggctccaggctgaggatgaggctgattattactgctgctcatatgcaggcagctacacttatgtcttcggaactgggaccaaggtcaccgtcctag

SEQ ID NO: 7972 - DNA, 322 bp, synthetic construct
  misc_feature 1..322: note = Synthetic construct
  source 1..322: mol_type = other DNA
gccatccagatgacccagtctccatcctccctgtctgcatctgtaggagacagagtcaccatcacttgccgggcaagtcaggacattagaaatgatttaggctggtatcagcagaaaccagggaaagcccctaggctcctgatctatcgtgcatccactttacaaagtggggtcccgtcaaggttcagcggcagtgtgtctggcacagatttcactctcaccatcagcagccttcagcctgaagattttgccacttattactgtctacaggattacaattacccgtgggcgttcggccaagggacccaggtggaaatcaaac

SEQ ID NO: 7973 - DNA, 331 bp, synthetic construct
  misc_feature 1..331: note = Synthetic construct
  source 1..331: mol_type = other DNA
aactttatgttgactcagccccactctgtgtcggagtcaccggggaagacggtaaccatctcttgtattcgcggcagtggcagcataaccagcgcctatgtgcagtggttccaactgcgcccgggcagtgtccccaccactgtgatctatgaggataaccaaagaccctctggggtccctgatcggttctctggctccatcgacagctcctccaactctgcctccctcaccatctctggactgaagactgaggacgcggctgactactactgtcagtcttatgaaaacagttattgggtgttcggcggagggaccaggctgaccgtcctag

SEQ ID NO: 7974 - DNA, 322 bp, synthetic construct
  misc_feature 1..322: note = Synthetic construct
  source 1..322: mol_type = other DNA
gaaatagtgatgacgcagtctccagccaccctgtctgtgtctccaggggatagagccaccctctcctgcagggccagtcagagtgtgagcagcagcttagcctggtaccagcacaaacctggccaggctcccaggctcctcatctatggtgcatcctccagggccactgatatcccagtcaggttccgtggcagtgggtctgggacagagttcactctcaccatcagcagcctgcagtctgaagattttgcagtttattactgtcagcaatattataactggcctcggacgttcggccaagggaccaaggtggaaatcaaac

SEQ ID NO: 7975 - DNA, 325 bp, synthetic construct
  misc_feature 1..325: note = Synthetic construct
  source 1..325: mol_type = other DNA
tcttatgtgctgactcagccaccctcggtgtcagtggccccaggacagacggccaggattacctgtgggggagacaacattagaagtaagagtttgcactggtaccagcagaagccaggccaggcccctgttttggtcgtctatgatgatagcgaccggccctcagggatccctgagcgattctctggctccaactctgggaacacggccaccctgaccatcaccagagtcgaagccggggatgaggccgactattcctgtcaggtgtgggatagtagtggtgatcatccggtgttcggcggagggaccaagctgaccgtcctag

SEQ ID NO: 7976 - DNA, 331 bp, synthetic construct
  misc_feature 1..331: note = Synthetic construct
  source 1..331: mol_type = other DNA
cagtctgccctgactcagcctcgctcagtgtccggatctcctggacagtcagtcaccatctcctgcactggaaccagcagtgatgttggtggttataattctgtctcctggtaccaacaccacccaggcaaagcccccaaactcatgatttatgatgtcactaagcggccctcaggggtccctgatcgcttctctggctccaagtctggcaacacggcctccctgaccatctctgggctccaggctgaagatgaggctgattattactgctgctcatatgcaggcagctacactcatgtcttcggaactgggaccaaggtcaccgtcctag

SEQ ID NO: 7977 - DNA, 343 bp, synthetic construct
  misc_feature 1..343: note = Synthetic construct
  source 1..343: mol_type = other DNA
gacatcgtggtgacccagtctccagactccctggctgtgtctctgggcgagagggccaccatcaactgcaagtccagccagagtgttttatccagctccaacaataaggactacttagcttggtaccagcagaaaccaggacagcctcctaagctgctcatttactgggcatctacccgagaatccggggtccctgaccgattcagtggcagcgggtctgggacagatttcactctcaccatcaacagcctgcaggctgaagatgtggcagtttattactgtcaggaatttcatgatactctcgggctcactttcggcggagggaccagggtggagatcaaac

SEQ ID NO: 7978 - DNA, 322 bp, synthetic construct
  misc_feature 1..322: note = Synthetic construct
  source 1..322: mol_type = other DNA
gacatccagatgacccagtctccatcctccctgtctgcatctgtgggagacagagtcaccatcacttgccgggcgagtcagaccgtaaccaggtttttaaattggtatcagctcagaccgggggaagcccctaacctcctgatccattctacttccactttgcaaagtggagtcccgtcaaggttcagtggcagtggttctgggacagatttcactctcaccatcagcagtctgcaacctgaagattttgcgatttacttctgtcagcagacttacagtgccccatggacgttcggccaggggaccaaggtggaggtcaaac

SEQ ID NO: 7979 - DNA, 325 bp, synthetic construct
  misc_feature 1..325: note = Synthetic construct
  source 1..325: mol_type = other DNA
gaaatagtgctgacgcagtctccagccaccctgtctgtgtctccaggggaaagagccaccctctcctgcagggccagtcggcctgttagcagcaacttagcctggtaccagcagagacatggccaggctcccaggctcctcatctatgccgcatccaccagggccactggtatcccagccaggttcagtggcagtgggtctgggacagagttcactctcaccatcagcagcctgcagtctgaagatttggcggtttattactgtcaacattatgttaactggcctccgtggacgttcggccaggggaccaaggtggaaatcaaac

SEQ ID NO: 7980 - DNA, 322 bp, synthetic construct
  misc_feature 1..322: note = Synthetic construct
  source 1..322: mol_type = other DNA
gacatccagatgacccagtctccgtcctccctgtctgcatctgtaggagacagagtcaccatcacttgccgggcaagtcagggcattggaaatgatttaggctggtatcagcaaaaaccagggaatgcccctaagcgcctgatctacgatgcatccagtttgcaaagtggggtcccatcgaggttcagcggcagtggatctgggacagaattcactctcacaatcagcagcctgcagcctgaagattttgcaacctattactgtctacaacataatagttaccctctcactttcggcggagggaccaaggtggaggtcaaac

SEQ ID NO: 7981 - DNA, 337 bp, synthetic construct
  misc_feature 1..337: note = Synthetic construct
  source 1..337: mol_type = other DNA
gatattgtgatgactcagtctccactctccctgcccgtcacccctggagagccggcctccatctcctgcaagtctagtcagagcctcctgcatagtcatggatacaactatttggcttggtacctgcagaggccagggcagtctccacagctcctaatctacttgggatctactcgggcctccggagtccctgccaggttccgtggcactggatcaggcacagattttacactgagaatcagcagagtggaggctgaggatgttggggtttattactgcatgcaggctctacagactcctcccaccttcggccaagggaccaaggtggaaatcaaac

SEQ ID NO: 7982 - DNA, 106 bp, synthetic construct
  misc_feature 1..106: note = Synthetic construct
  source 1..106: mol_type = other DNA
atctctgggctccaggctgacgacgaggctgattattactgcacctcatatacaaacgacagcaattctcaggtattcggcggagggaccaagctgaccgtcctag

SEQ ID NO: 7983 - DNA, 322 bp, synthetic construct
  misc_feature 1..322: note = Synthetic construct
  source 1..322: mol_type = other DNA
gacatccagatgacccagtctccatcctccctgtctgcatctgtaggagacagagtcaccatcacttgccgggcaagtcagagcattagcagctatttaaattggtatcagcagaaaccagggaaagcccctaagttcctgatctatgctgcattcaatttgcaagatggagtcccatcaaggttcagtggcagtggatctgggacagatttcactctcaccatcagtagtctccaacctgaagattttgcaacttactactgtcaacagagttacagcacccccttcactttcggccctgggaccagagtggatatcaaac

SEQ ID NO: 7984 - DNA, 313 bp, synthetic construct
  misc_feature 1..313: note = Synthetic construct
  source 1..313: mol_type = other DNA
tcttctgggctgactcaggaccctgttgtgtctgtggccttggggcagacagtcaagatcaaatgccagggtgacagactcaaaacctggctccaacagaggcctggacaggcccctcgacttgtcctctacgataaagacaaacggccctcagggatcccagaccgattctctggctccagctcaggaaacacagataccttgaccatcactggggttcaggcggaagatgagggtgactattattgttattcccgtgccggtactggtgaccatgtggtgttcggcggagggaccaagctgaccgtcctag

SEQ ID NO: 7985 - DNA, 325 bp, synthetic construct
  misc_feature 1..325: note = Synthetic construct
  source 1..325: mol_type = other DNA
gaaattgtgttgacacagtctccagccaccctgtccttgtctccaggggaaagagccaccctctcctgcagggccagtcagagtgttagcagttccttagcctggtaccaacagaaacctggccaggctcccaggctcctcatctatgatgcatccaacagggccactggcatcccagccaggttcagtggcagtgggtctgggacagacttcactctcaccatcagcagcctagagcctgaagattttgcactttattactgtcagcagcgtagcgactggccgcctctcactttcggcggagggaccaaggtggagatcaacc

SEQ ID NO: 7986 - DNA, 334 bp, synthetic construct
  misc_feature 1..334: note = Synthetic construct
  source 1..334: mol_type = other DNA
cagttaatgctgactcaagcgccctctgcctctgcctcactgggagcctcacttaacctcaaatgcactctggacagtggacacgacacctacgccgtcgcttggcttcagcagcggccagggaagggccctcgattcttgatgacggttgatcctgacggcaattatcatcaggatgacgagttgtctgatcgcttctcaggctccttctctggggctgaccgctacctcaccatctccagcctccagcctgaggatgaggctgactattactgtcagacctgggacactggcgttcgcctgttcggcggagggaccaagctgaccgtcctag

SEQ ID NO: 7987 - DNA, 322 bp, synthetic construct
  misc_feature 1..322: note = Synthetic construct
  source 1..322: mol_type = other DNA
gaaagagtgatgacgcagtctccagccaccctgtctgtgtctccaggggaaagagccaccctctcctgcagggccagtcagagtgttagcagcaacttagcctggtaccagcagaaacctggccagggtcccaggctcctcatctatggtgcatccaccagggccactggtatcccagccacgttcagtggcagtgggtctgggacagagttcactctcaccatcagcagcctgcagtctgaagattttgcagtttattactgtcagcagtataatgactggccgtggacgttcggccaagggaccaaggtggaaatcaaac

SEQ ID NO: 7988 - DNA, 322 bp, synthetic construct
  misc_feature 1..322: note = Synthetic construct
  source 1..322: mol_type = other DNA
gacatccagatgacccagtctccatcctccctgtctgcatctgtaggagacagagtcaccatcacttgccgggcgagtcagggcattagcaattatttagcctggtatcagcagaaaccaggcaaagttcctaagctcctgatctatgctgcatccactttgcaatcaggggtcccatctcggttcagtggcactggatctgggacagatttcactctcaccatcagcagcctgcagcctgaagatgttgcaacttattactgtcaaaagtataacagtgccccgctcactttcggcggagggaccaaggtggagatcaaac

SEQ ID NO: 7989 - DNA, 322 bp, synthetic construct
  misc_feature 1..322: note = Synthetic construct
  source 1..322: mol_type = other DNA
gacatccagatgacccagtctccatcctccctgtctgcatctgtaggagacagagtcaccatcacttgccgggcgagtcagaacatttacaattatttagtctggtatcaacagaaacctgggaaagttcctaagctcctgatttatgctgcatccactttgcattcaggggtcccatctcggttcagtggcagtggttctgggacagatttcactctcaccatcagcagcctgcagcctgaagatgttgcaacttattactgtcaaaactataacagtgccccattcactttcggccctgggaccaaagtggatatcaaac

SEQ ID NO: 7990 - DNA, 325 bp, synthetic construct
  misc_feature 1..325: note = Synthetic construct
  source 1..325: mol_type = other DNA
tcttctgagctgactcaggaccctgctgtgtctgtggccttgggacagacagtcaggatcacatgccaaggagacagcctcagaaattattatgcaagttggtaccagcagaagccaggacaggcccctgtgtttgtcatctatggtaaaaacaaccggccctcagggatcgcagaccgattctctggctccatctcaggaaacacagcttccttgaccatcactggggctcaggcggaagatgaggctgactattactgtaactcccgggacaccagtggtaaccgttgggtgttcggcggagggaccaaactgaccgtcctag

SEQ ID NO: 7991 - DNA, 319 bp, synthetic construct
  misc_feature 1..319: note = Synthetic construct
  source 1..319: mol_type = other DNA
gaaatagtgatgacgcagtctccagccaccctgtctgtgtctccaggggaaagagccaccctctcctgcagggccagtcagagtgttaacaacttagcctggtaccagcagaaacctggccaggctcccaggctcctcatctatggtgcatccaccagggccactggtatcccagccaggttcagtggcagtgggtctgggacagagttcactctcaccatcagcagcctgcagtctgaagattttgcagtttattactgtcagcagtataatgactggctgatcacgttcggccaagggacacgactggagattaaac

SEQ ID NO: 7992 - DNA, 331 bp, synthetic construct
  misc_feature 1..331: note = Synthetic construct
  source 1..331: mol_type = other DNA
cagtctgtgctgactcagcccccctcaacgtctgggacccccgggcagagggtcaccatctcttgttctgggaccagctccaacatcggatttaattctgtgaactggtaccagcacctcccaggaacggcccccaaactcctcatctttaggactaatgagcggccctcaggggtccctgaccgtttctctggctccaagtctggcacctcagcctccctggccatcagtgggctccaggctgaggatgaggctgattattactgtgcatcatgggatgacagcctgaatggttgggggttcggcggagggaccaaactgaccgtcctag

SEQ ID NO: 7993 - DNA, 322 bp, synthetic construct
  misc_feature 1..322: note = Synthetic construct
  source 1..322: mol_type = other DNA
tcctatgtactgactcagccaccctcggtgtcagtggccccaggacagacggccaagattacctgtgggggaaacaacattggaagtaaaactgtccactggtaccagcagaagccaggccaggcccctgtgctcgtcgtctttgatgatagcgaccggccctcagggatccctgagcgattctctggctccaaatctgggaacacggccaccctgaccatcggcagggtcgaagccggggatgaggccgacttttactgtcaggtgtgggatagtagtactgatcatctattcggcggcgggaccaagctgaccgtcctag

SEQ ID NO: 7994 - DNA, 331 bp, synthetic construct
  misc_feature 1..331: note = Synthetic construct
  source 1..331: mol_type = other DNA
cagtctgtcttgactcagccaccctcagtgtctgggacccccgggcagagggtcaccatgtcttgttctggaagcagctcaaacatcggaagaaaccctgtaaactggtatcagcaagtcccaggatcggcccccaaagtcctcatgtatagggattctcaacggcccacaggggtccccgaccgattcctcggctccaactctggcacctcagcctccctggccatcagtgacctccagactgacgatgaggctgattattactgtgcagtttgggatgacaacctgagggcttgggtgttcggcggagggaccaagttgaccgtcctag

SEQ ID NO: 7995 - DNA, 322 bp, synthetic construct
  misc_feature 1..322: note = Synthetic construct
  source 1..322: mol_type = other DNA
gacatccagatgacccagtctccatcctccctgtctgcgtctgtaggagacagagtcaccatcacttgccgggcgagtcagggcattagcaattatttagcctggtatcagcagacaccagggaaagttccaaagctcctgatctacgctgcatccactttgcagtcaggggtcccatctcggttcagtggcagtggatctgggacagaattcactctcaccatcagcagcctgcagcctgaggatgttgcaacttattactgtcaaaagtataacagtgccccattcactttcggccctgggaccaaagtggaaatcaaac

SEQ ID NO: 7996 - DNA, 217 bp, synthetic construct
  misc_feature 1..217: note = Synthetic construct
  source 1..217: mol_type = other DNA
tcttctgagctgactcaggaccctggtgtgtctgtggccttgggacagacagtcaggatcacatgccaaggagacagcctcagaaggtcaggaaacacagcttccttgaccatcactggggctcgggcggaagatgaggctgactattactgtcagtcccgggacagcagtggtaaccagctggtgttcggcagagggacgaagctgatcgtcctag

SEQ ID NO: 7997 - DNA, 322 bp, synthetic construct
  misc_feature 1..322: note = Synthetic construct
  source 1..322: mol_type = other DNA
gacatccagatgacccagtctccttccaccctgtctgcatctgtaggagacagagtcaccttcacttgccgggccagtcagagtattgatagctggttggcctggtatcagcagaaaccagggaaagcccctaaactcctgatctataaggcgtctagtttacaaagtggggtcccatcacggttcagcggcagtggatctgggacagaattcactctcaccatcagcagcctgcagcctgatgattttgcaacttattactgccaacagtataatacttattcgtacacttttggccaggggaccaagctggagatcaagc

SEQ ID NO: 7998 - DNA, 322 bp, synthetic construct
  misc_feature 1..322: note = Synthetic construct
  source 1..322: mol_type = other DNA
gacatccagatgacccagtctccttccaccctgtctgcatctgtaggagacagagtcaatatcacttgccgggccagtcagagtattagtagctggttggcctggtatcagcagaaaccagggaaagcccctaacctcctcatctatagggcgtctaggttacaaagtggggtcccaccaaggtttagcggcagtggatctgggacagaattcacactcaccatcagcagtctgcagcctgatgattttgcaacttattactgccaacagtataaaagttattcgtggacgttcggccaagggaccaaggtggaaatcaaac

SEQ ID NO: 7999 - DNA, 325 bp, synthetic construct
  misc_feature 1..325: note = Synthetic construct
  source 1..325: mol_type = other DNA
tactatgtgctgactcagccaccctcggtgtcagtggccccaggacagacggccaggatcacctgcgggggaaacaacattggaagtagaagtgtgcactggtaccaccagaagccaggccaggcccctgtgctggtcgtctatgatgatagcgaccggccctcagggatccctgagcgattttctggctccaactctgggaacacggccaccctgaccatcagcagggtcgaggccggggatgaggccgactattactgtcagatttgggatattgacagtgatcattgggtgttcggcggagggaccaagctgaccgtcctag

SEQ ID NO: 8000 - DNA, 331 bp, synthetic construct
  misc_feature 1..331: note = Synthetic construct
  source 1..331: mol_type = other DNA
cagtctgccctgactcagcctcgctcagtgtccgggtctcctggacagtcagtcaccatctcctgcactggaaccagcagtgatgttggtggttataactatgtctcctggtaccaacaacacccaggcaaagcccccaaactcatgatttataatgtcagtcagcggccctcaggagtccctcatcgtttctctggctctaagtctggcaacacggcctccctgaccatctctgggctccaggctgacgatgaggctgactattactgctgctcatatgcaggcagttacacttttctcttcggaactgggaccaaggtcaccgtcctag

SEQ ID NO: 8001 - DNA, 322 bp, synthetic construct
  misc_feature 1..322: note = Synthetic construct
  source 1..322: mol_type = other DNA
tcccatgtgctgactcagccaccctcggtgtcagtggccccaggacagacggccaggattacctgtgggggagacaacattgggagtcaaagtgtgcactggtaccagcagaagccaggccaggcccctgtgctggtcgtctatgatgatagcgaccggccctcagggatccctgagcgattctctggctccaactctgggaactcggccaccctgaccatcagcagggtcgaggccggggatgaggccgactactactgtcaggtgtggaatagtattagtgattatgtcttcggaactgggaccaaggtcaccgtcctag

SEQ ID NO: 8002 - DNA, 334 bp, synthetic construct
  misc_feature 1..334: note = Synthetic construct
  source 1..334: mol_type = other DNA
cagtctgtgctgacgcagccgccctcagtgtctggggccccagggcagagggtcaccatctcctgcactgggagcagctccaacatcggggcaggttatgatgtacactggtaccagcagcttccaggaacagcccccaaactcctcatctatggtaacagcaatcggccctcaggggtccctgaccgattctctggctccaagtctggcacctcagcctccctggccatcactgggctccaggctgaggatgaggctgattattactgccagtcctatgacagcagcctgagtgccgtggtattcggcggacagaccaagctgaccgtcctag

SEQ ID NO: 8003 - DNA, 334 bp, synthetic construct
  misc_feature 1..334: note = Synthetic construct
  source 1..334: mol_type = other DNA
cagcttgtgctgactcaatcgccctctgcctctgcctccctgggagcctcggtcaagctcacctgcactctgagcagtgggcacagcagctacgccatcgcatggcatcagcagcagccagagaagggccctcggtacttgatgaagcttaacagtgatggcagccacagcaagggggacgggatccctgatcgcttctcaggctccagctctggggctgagcgctacctcaccatctccagcctccagtctgaggatgaggctgactattactgtcagacctggggcactggcattcaggtgttcggcggagggaccaagctgaccgtcctag

SEQ ID NO: 8004 - DNA, 322 bp, synthetic construct
  misc_feature 1..322: note = Synthetic construct
  source 1..322: mol_type = other DNA
gccatccggatgacccagtctccatcctcactctctgcatctacaggagacagagtcaccatcacttgtcgggcgagtcagggtattagcagttatttagcctggtatcagcaaaaaccagggaaagcccctaagctcctgatctatgctgcatccactttgcaaagtggggtcccatcaaggttcagtggcagtggatctgggacagatttcactctcaccatcagctgcctgcagtctgaagattttgcaacttattactgtcaacagtattatagttaccctccgacgttcggccaagggaccaaggtggaaatcaaac

SEQ ID NO: 8005 - DNA, 322 bp, synthetic construct
  misc_feature 1..322: note = Synthetic construct
  source 1..322: mol_type = other DNA
gacatccagatgacccagtctccatcctccctgtctgcatctgtaggagacagagtcaccatcacttgccgggcgagtcagggcattagcaattatttagcctggtatcagcagaaaccagggaaagttcctaagctcctgatctatgctgcatccactttgcaatcaggggtcccatctcggttcagcggcagtggatctgggacagatttcactctcaccatcagcagcctgcagcctgaagatgttgcaacttattactgtcaaaagtataacagtgccccattcactttcggccctgggaccaaagtggatatcaaac

SEQ ID NO: 8006 - DNA, 227 bp, synthetic construct
  misc_feature 1..227: note = Synthetic construct
  source 1..227: mol_type = other DNA
ggggtatcagcaagtcccaggatcggcccccaaagtcctcatgtatagggattctcaacggcccacaggggtccccgaccgattcctcggctccaactctggcacctcagcctccctggccatcagtgacctccagactgacgatgaggctgattattactgtgcagtttgggatgacaacctgagggcttgggtgttcggcggagggaccaagttgaccgtcctag

SEQ ID NO: 8007 - DNA, 325 bp, synthetic construct
  misc_feature 1..325: note = Synthetic construct
  source 1..325: mol_type = other DNA
tcctatgagctgacacagccaccctcggtgtcagtgtccccaggacagacggccaggatcacctgctctggagatgcattgccaaagcaatatgcttattggtaccagcagaagccaggccaggcccctgtgctggtgatatataaagacagtgagaggccctcagggatccctgagcgattctctggctccagctcagggacaacagtcacgttgaccatcagtggagtccaggcagaagacgaggctgactattactgtcaatcagcagacagcagtggtacttatcgggtattcggcggagggaccaagctgaccgtcctag

SEQ ID NO: 8008 - DNA, 340 bp, synthetic construct
  misc_feature 1..340: note = Synthetic construct
  source 1..340: mol_type = other DNA
gacatcgtgatgacccagtctccagactccctggctgtgtctctgggcgagagggccaccatcaactgcaagtccagccagagtgttttatacagctccaacaataagaactacttagcttggtaccagcagaaaccaggacagcctcctaagctgctcatttactgggcatctacccgggaatccggggtccctgaccgattcagtggcagcgggtctgggacagatttcactctcaccatcagcagcctgcaggctgaagatgtggcagtttattactgtcagcaatattatagtactcttcggacgttcggccaagggaccaaggtggaaatcaaac

SEQ ID NO: 8009 - DNA, 328 bp, synthetic construct
  misc_feature 1..328: note = Synthetic construct
  source 1..328: mol_type = other DNA
caggctgtggtgactcaggagccctcactgactgtgtccccaggagggacagtcactctcacctgtggctccagcactggagctgtcaccagtggtcattatccctactggttccagcagaagcctggccaagcccccaggacactgatttatgatacaagcaacaaacactcctggacacctgcccggttctcaggctccctccttgggggcaaagctgccctgaccctttcgggtgcgcagcctgaggatgaggctgagtattactgcttgctctcctatagtggtgcttgggtgttcggcggagggaccaagctgaccgtcctag

SEQ ID NO: 8010 - DNA, 322 bp, synthetic construct
  misc_feature 1..322: note = Synthetic construct
  source 1..322: mol_type = other DNA
gccatccagatgactcagtctccatcctccctgtctgcatctgtaggagacagagtcaccatcacttgccgggcaagtcagaccattactaggtctttgaattggtatcagcagagacccgggaaagcccctcaactcctgatctattctacatccagtttgccgagtggggtcccatcaagattcactggcagtggatctgggacagatttcactctcaccatcagcagtctgcaacctgaagattttgcaacttactactgtcaacagacttacagtgccccgtacacttttggccaggggaccaaactggagatcaaac

SEQ ID NO: 8011 - DNA, 325 bp, synthetic construct
  misc_feature 1..325: note = Synthetic construct
  source 1..325: mol_type = other DNA
tcctatgacctgacacagccaccctcggtgtcagtgtccccacgacagacggccacgatcacctgctctggagatgcattgccaaatcaacatgtttcttggtaccagcagaaggcaggccaggcccctgtgttggtgatatataaagacactgagaggccctcagggatccctgagcgattctctggctccacctcagggacaacagtcacgttgaccataagtggagtccaggcagaagacgaggctgactattattgtcaatcagcagacagcagtggtctttattatgtcttcggaagtgggaccacagtcaccgtcctaa

SEQ ID NO: 8012 - DNA, 325 bp, synthetic construct
  misc_feature 1..325: note = Synthetic construct
  source 1..325: mol_type = other DNA
gacatccagatgacccagtctccatcctccctgtctgcatctgtaggagacagagtcaccatcacttgccgggcaagtcagagcattagcagctatttaaattggtatcagcagaagccagggaaagcccctaagctcctgatctatgctgcatccactttgcaaagtggggtcccatcaaggttcagtggcagtggatctgggacagatttcactctcaccatcagcagtctccaacctgaagattttgcaacttactactgtcaacagagttacagtacccccctgtacacttttggccaggggaccaagctggagatcaaac

SEQ ID NO: 8013 - DNA, 322 bp, synthetic construct
  misc_feature 1..322: note = Synthetic construct
  source 1..322: mol_type = other DNA
gccatccagatgacccagtctccatcctccctgtctgcatctgtaggagacagagtcaccatcacttgccgggcaagtcagggcattagaaatgacttaggctggtatcagaagaagccagggaaagcccctaagctcctgatctatgctgcatccagtgtccaaagtggggtcccatcgaggttcagcggcagtggatctggcacagatttcactctcaccatcagcagcctgcagcctgaagattttgcaacttattactgtctacaagattacaattaccctcgaacgttcggccaagggaccaaggtggaaatcaaac

SEQ ID NO: 8014 - DNA, 322 bp, synthetic construct
  misc_feature 1..322: note = Synthetic construct
  source 1..322: mol_type = other DNA
caaattgtgttgacacagtctccagccaccctatctttgtctccaggggaaaaagccaccctctcatgcagggccagtcagagtgttaggaattacttagcctggcaccaacagaaacctggccaggctcccaggctcctcatctatgatgcctccaccagggccattgacatccccgccaggttcagtggcagtgggtctgggacagacttcactctcaccatcagcggcctggagcctgaagattttgcagtttattattgtcagcagcgtagcaactggccggagacttttggccaggggaccaagctggagatcaatc

SEQ ID NO: 8015 - DNA, 325 bp, synthetic construct
  misc_feature 1..325: note = Synthetic construct
  source 1..325: mol_type = other DNA
gaaattgtgttgacacagtctccagccaccctgtctttgtctccgggggaaagagccaccctctcctgcagggccagtcagagtgttaacaccgacttagcctggtaccaacagaggcctggccaggctccccggctcctcatctatactgcatccaacagggccactggcatcccagccaggttcagtggcagtgggtctgggacagacttcactctcaccatcagcagccttgagcctgaagattttgcagtttattactgtcagcagcgtagcaactggcctccgatcaccttcggccaagggacacgattggagattaacc

SEQ ID NO: 8016 - DNA, 325 bp, synthetic construct
  misc_feature 1..325: note = Synthetic construct
  source 1..325: mol_type = other DNA
tcttctgagctgactcaggaccctgctgtgtctgtggccttgggacagacagtcaggatcacatgccaaggagacagcctcagaagctattctccaagctggtaccagcagaagccaggacaggcccctgtacttgtcatctatggtaaaaacaaccggccctcagggatcccagaccgattctctggctccagctcaggaaacacagcttccttgaccatcactggggctcaggcgaaagatgaggctgactattactgtaactcccgggacagcagtggcaagcatctgctattcggcggagggaccaagctgaccgtcctag

SEQ ID NO: 8017 - DNA, 331 bp, synthetic construct
  misc_feature 1..331: note = Synthetic construct
  source 1..331: mol_type = other DNA
aattttatgctgactcagccctactctgtgtcggagtctccggggaagacggtaaccatctcctgcacccgcagcagtggcagcattgccaacaactatgtgcagtggtaccagcagcgcccgggcagtgcccccaccacagtgatctatgaggattaccaaagaccctctggggtccctgatcggttctctggctccatcgacacctcctccaactctgcctccctcaccatctctggactgaagactgaggacgaggctgactactactgtcagtcttatgatagtacttatagggtgttcggcggagggaccaagctgaccgtcgtag

SEQ ID NO: 8018 - DNA, 328 bp, synthetic construct
  misc_feature 1..328: note = Synthetic construct
  source 1..328: mol_type = other DNA
tcttctgagctgactcaggaccctgctgtgtctgtggccttgggacagacagtcacgatcacctgccaaggagacagcctcgaaagctattatgcaacctggtaccagcagaggccaggacaggcccccatacttgtcctctatggtaaaaacaatcggccctcagggatccccgaccgattctctggctccagctcaggaaccacagcttccttgaccatcactggggctcaggcggaagatgaggctgactattactgtaattcccgggacatgagtggtaaccatctgggggtcttcggaactgggaccaaggtcaccgtccttg

SEQ ID NO: 8019 - DNA, 322 bp, synthetic construct
  misc_feature 1..322: note = Synthetic construct
  source 1..322: mol_type = other DNA
gacatccagatgacccagtctccttccaccctgtctgcatctgtaggagacagagtcaccatcacttgccgggccagtcagagtattagtagctggttggcctggtatcagcagaaaccagggaaagcccctaagctcctgatctataaggcatctagtttagaaagtggggtcccatcaaggttcagcggcagtggatctgggacagaattcactctcaccatcagcagcctgcagcctgatgattttgcaacttattactgccaacagtataatagttattctcagacgttcggccaagggaccaaggtggaaatcaaac

SEQ ID NO: 8020 - DNA, 328 bp, synthetic construct
  misc_feature 1..328: note = Synthetic construct
  source 1..328: mol_type = other DNA
tcctatgtgctgactcagccaccctcagtgtcagtggccccaggaaagacggccaggattacctgtgggggaaacaacattggaagtaaaagtgtgcactggtaccagcagaagccaggccaggcccctgtgctggtcgtctatgatgatagcgaccggccctcagggatccctgagcgattctctggctccaactctgggaacacggccaccctgaccatcagcagggtcgaagccggggatgaggccgactattactgtcaggtgtgggatagtagtagtgatcatccgggggtattcggcggagggaccaagctgaccgtcctag

SEQ ID NO: 8021 - DNA, 322 bp, synthetic construct
  misc_feature 1..322: note = Synthetic construct
  source 1..322: mol_type = other DNA
gacatccagatgacccagtctccttccaccctgtctgcatctgtaggagacagagtcaccatcacttgccgggccagtcagagtattagtagctggttggcctggtatcagcagaaaccagggaaagcccctaagctcctgatctataaggcatctagtttagaaagtggggtcccatcaaggttcagcggcagtggatctgggacagaattcactctcaccatcagcagcctgcagcctgatgattttgcaacttattactgccaacagtataatagttattctcggacgttcggccaagggaccaaggtggaaatcaaac

SEQ ID NO: 8022 - DNA, 325 bp, synthetic construct
  misc_feature 1..325: note = Synthetic construct
  source 1..325: mol_type = other DNA
tcctatgagctgactcagccaccctcagtgtccgtgtccccaggacagacagccagcatcacctgctctggagataaattgggggataaatatgcttgctggtatcagcagaagccaggccagtcccctgtgctggtcatctatcaagatagcaagcggccctcagggatccctgagcgattctctggctccaactctgggaacacagccactctgaccatcagcgggacccaggctatggatgaggctgactattactgtcaggcgtgggacagcagcactgccctttatgtcttcggaactgggaccaaggtcaccgtcctag

SEQ ID NO: 8023 - DNA, 322 bp, synthetic construct
  misc_feature 1..322: note = Synthetic construct
  source 1..322: mol_type = other DNA
gccatccggataacccagtctccatcctcactctctgcatctacaggagacagagtcaccatcacttgtcgggcgagtcagggtattagcagttatttagcctggtatcagcaaaaaccagggaaagcccctaagctcctgatctatgctgcatccactttgcaaagtggggtcccatcaaggttcagcggcagtggatctgggacagatttcactctcaccatcagctgcctgcagtctgaagattttgcaacttattactgtcaacagtattatagttacccgctcactttcggcggagggaccaaggtggagatcaaac

SEQ ID NO: 8024 - DNA, 322 bp, synthetic construct
  misc_feature 1..322: note = Synthetic construct
  source 1..322: mol_type = other DNA
gaaatagtgatgacgcagtctccagccaccctgtctgtgtctccaggggaaagagccaccctctcctgcagggccagtcagagtgttagcagcaacttagcctggtaccagcagaaacctggccaggctcccaggctcctcatctatggtgcatccaccagggccactggtatcccagccaggttcagtgccagtgggtctgggacagagttcactctcaccatcagcagcctgcagtctgaagattttgcagtttattactgtcagcagtataataactggcctccgacgttcggccaagggaccaaggtggaaatcaaac

SEQ ID NO: 8025 - DNA, 274 bp, synthetic construct
  misc_feature 1..274: note = Synthetic construct
  source 1..274: mol_type = other DNA
tcctgcactggaaccagcagtgacgttggtggttataactatgtctcctggtaccaacaaaacccaggcaaagcccccaaactcatgatttatgatgtcagtaatcggccctcagggatttctaatcgcttctctggctccaagtctggcaacacggcctccctgaccatctctgggctccaggctgacgacgaggctgattattactgcacctcatatacaaacgacagcaattctcaggtattcggcggagggaccaagctgaccgtcctag

SEQ ID NO: 8026 - DNA, 325 bp, synthetic construct
  misc_feature 1..325: note = Synthetic construct
  source 1..325: mol_type = other DNA
gaaatagtgatgacgcagtctccagccaccctgtctgtgtctccaggggaaagagccaccctctcctgcagggccagtcagagtgttagcagcaacttagcctggtaccagcagaaacctggccaggctcccaggctcctcatctatggtgcatccaccagggccactggtatcccagccaggttcagtggcagtgggtctgggacagagttcactctcaccatcagcagcctgcagtctgaagattttgcagtttattactgtcagcagtataataactggcctccgtacacttttggccaggggaccaagctggagatcaaac

SEQ ID NO: 8027 - DNA, 325 bp, synthetic construct
  misc_feature 1..325: note = Synthetic construct
  source 1..325: mol_type = other DNA
tcttctgagctgactcaggaccctgctgtgtctgtggccttgggacagacagtcaggatcacatgccaaggagacagcctcagaagctattatgcaagctggtaccagcagaagccaggacaggcccctgtacttgtcatctatggtaaaaacaaccggccctcagggatcccagaccgattctctggctccagctcaggaaacacagcttccttgaccatcactggggctcaggcggaagatgaggctgactattactgtaactcccgggacagcagtggtaaccattatgtcttcggaactgggaccaaggtcaccgtcctag

SEQ ID NO: 8028 - DNA, 322 bp, synthetic construct
  misc_feature 1..322: note = Synthetic construct
  source 1..322: mol_type = other DNA
gacatccagatgacccagtctccttccaccctgtctgcatctgtaggagacagagtcaccatcacttgccgggccagtcagagtattagtagctggttggcctggtatcagcagaaaccagggaaaacccctaagctcctgatctataaggcatctagtttagaaagtggggtcccatcaaggttcagcggcagtggatctgggacagaattcactctcaccatcagcagcctgcagcctgatgattttgcaacttattactgccaacagtataatagttatctattcactttcggccctgggaccaaagtggatatcaaac

SEQ ID NO: 8029 - DNA, 322 bp, synthetic construct
  misc_feature 1..322: note = Synthetic construct
  source 1..322: mol_type = other DNA
gacgtccagatgacccaatctccatcttccgtgtctgcatctgtaggagaccgagtcaccatcacttgtcgggcgagtcaaagtatcagtaactgggtagcctggtatcagcagaaagcagggaaagcccccaagctcctgatctctggtgcatccagtttgcaaagtggggtcccatcaagattcagcggcagtggatctgggacagatttcactctcaccatcaccagtctgcaggctgaagactctgcaacttactattgtcaacaggccaacagtttcccgctctctttcggcggagggaccaaggtggagatcaccc

SEQ ID NO: 8030 - DNA, 322 bp, synthetic construct
  misc_feature 1..322: note = Synthetic construct
  source 1..322: mol_type = other DNA
gaagttctcttgacacagactccagccaccctgtctttgtctccaggggagagagccaccctctcctgcagggccaatcaaagtgttggcacctacttagtctggtaccaacagaaacctggccaggctcccagggtcgtcatctctgatgcatccaaccgggccactggcctcccagccaggttcagtggcagtgggtctgggacggatttcactctcaccatcagcagcctagagcctgacgattttgcagtttattactgtcagcaccgcagcacctggcctccgacgttcggccaggggaccaaggtggaaatcaaac

SEQ ID NO: 8031 - DNA, 310 bp, synthetic construct
  misc_feature 1..310: note = Synthetic construct
  source 1..310: mol_type = other DNA
gccatccagttgacccagtctccatccttcctgtctgcatctgtaggagacagagtcaccatcacttgccgggccagtcgggacattaggagttatttagcctggtatcagcaaaaaccagggaaagcccctaagctcctgatctatgctgcatccactttgcaaagtggggtcccatcaaggttcagcggcagtggatctgggacagagttcactctcacaatcagcagcctgcagcctgaagattttgcaacttattactgtcaacaccttaggacgttcggccaagggaccaaggtggaaatcaaac

SEQ ID NO: 8032 - DNA, 331 bp, synthetic construct
  misc_feature 1..331: note = Synthetic construct
  source 1..331: mol_type = other DNA
cagtctgccctgactcagcctgcctccgtgtctgggtctcctggacagtcgatcaccatctcctgcactggaaccagcagtgatgttgggagttataaccttgtctcctggtaccaacaacacccaggcaaagcccccaaactcatgatttatgagggcagtaagcggccctcaggggtttctaatcgcttctctggctccaagtctggcaacacggcctccctgacaatctctgggctccaggctgaggacgactctgattattactgctgctcatatgcaggtagtagtacttatgtcttcggaactgggaccaaggtcaccgtcctag

SEQ ID NO: 8033 - DNA, 322 bp, synthetic construct
  misc_feature 1..322: note = Synthetic construct
  source 1..322: mol_type = other DNA
aaaatagtgatgacgcagtctccagccaccctgtctgtgtctccaggggagagagccacgctctcctgcagggccagtcagagtgtcagcagcgacttagcctggtaccagcagaagcctggccaggctcccaggctcctcatctatggtgcatccaccagggccactggtatcacagccaggttcagtggcagcgggtctgggacagagttcactctcaccatcagcagcctgcagtctgaggattttgcagtttattactgtcagcaatatcatagctggccgggcacttttggccgggggtccaagctggagatcgaac

SEQ ID NO: 8034 - DNA, 322 bp, synthetic construct
  misc_feature 1..322: note = Synthetic construct
  source 1..322: mol_type = other DNA
gacatccagatgacccagcctccttccaccctgtctgcatctgtaggagacagagtcagcatcacttgccgggccagtcagaatattggtaactggttggcctggtatcagcagaaaccagggaaagcccctaaactcctgatctatcaggcatctagtttagagggtggggtcccatcaagattcagcggcagtagatctggtacagaattcactctcaccatcagcggcctgcagtctgatgattttgcaacttattactgccatcaatataatagttatccgacaacattcggccaagggaccaaggtggaaagcagac

SEQ ID NO: 8035 - DNA, 92 bp, synthetic construct
  misc_feature 1..92: note = Synthetic construct
  source 1..92: mol_type = other DNA
gactgacgatgaggctgattattactgtgcagtttgggatgacaacctgagggcttgggtgttcggcggagggaccaagttgaccgtcctag

SEQ ID NO: 8036 - DNA, 322 bp, synthetic construct
  misc_feature 1..322: note = Synthetic construct
  source 1..322: mol_type = other DNA
gacatccagatgacccagtctccttccaccctgtctgcatctgtaggggacagaatcaccatcacttgccgggccagtcagagcattggaagctggttggcctggtatcagcagagaccagggaaagcccctaaagtcctgatctataaggcgtctattttagaaagtggggtcccatccacattcagcggcagtggatctgggacagaattcactctcaccatcaccagcgtgcagcctgatgattctgcaacttattactgccaacactatgataattatccgtggacgttcggccaagggaccaaggtggagatcaaac

SEQ ID NO: 8037 - DNA, 325 bp, synthetic construct
  misc_feature 1..325: note = Synthetic construct
  source 1..325: mol_type = other DNA
tcctatgtgctgactcagccaccctcggtgtcagtggccccaggacagacggccagaattacctgtgaggcagacaacattggaagtaaaagtgtgcactggtaccagcagaagtcaggccaggcccctgtggtggtcgtgtatcatgatagcgaccggccctcggggatccctgagcgattttctggctccaactctggtaacacggccaccctgaccatcagcagggtcgaggccggggatgaggccgactatttctgtcaggtgtgggataacaatagtgaacatgaagtcttcggaactgggaccaaggtcaccgttctgg

SEQ ID NO: 8038 - DNA, 325 bp, synthetic construct
  misc_feature 1..325: note = Synthetic construct
  source 1..325: mol_type = other DNA
gacatgcagatgacccagtctccttccaccctgtctgcatttgtaggagacagagtcaccatcacttgccgggccagtcagagtattggcacgtggttggcctggtatcagcacaaaccagggacagcccctattctcctaatttataaggcatctaccttaaaaagtggggtcccatcaaggttcagcggcagtggatcagggacagaattcactctcaccatcagaagcctgcagcctgatgattttggaacttactactgccaacaatatgatagtcgttttccgtacacttttggccaggggaccaagctggagatcaaac

SEQ ID NO: 8039 - DNA, 331 bp, synthetic construct
  misc_feature 1..331: note = Synthetic construct
  source 1..331: mol_type = other DNA
cagtctgtgctgactcagccaccctcagcgtctgggacccccgggcagagggtcaccatctcttgttctggaagcagctccaacgtcggaagtaatactgtaaactggtaccagcagctcccaggaacggcccccaaactcctcatctataataataatcagcggccctcaggggtccctgaccgattctctggctccaagtctggcacctcagcctccctggccatcagtggactccagtctgaggatgaggctgattattactgtgcagcatgggatgacagcctgaatggtccggtcttcggaactgggaccaaggtcaccgtcctag

SEQ ID NO: 8040 - DNA, 328 bp, synthetic construct
  misc_feature 1..328: note = Synthetic construct
  source 1..328: mol_type = other DNA
gaattagtgatgacgcagtctccagccaccctgtctgtgtctccaggggagagagccaccctgtcctgcagggccagtcagagtgtttcccacaacttagcctggtaccagcagatacctggccaggctcccaggctcctcatctatggtgcatccaccagggccactggtatcccagccaggttcagtggcagtgggtctgggacagagttcaatctcaccatcagcagcctgcagcctgaagattttgcagtttattactgtcagttgtataataactggcctcggagaatcactttcggccctgggaccaaagtggatgtcaaac

SEQ ID NO: 8041 - DNA, 182 bp, synthetic construct
  misc_feature 1..182: note = Synthetic construct
  source 1..182: mol_type = other DNA
cactggaaccagcagtgacattgggatttctaatcgcttctctggctccaagtctggcaacacggcctccctgaccatctctgggctccaggctgacgacgaggctgattattactgcacctcatatacaaacaacagcaattctcaggtattcggcggagggaccaagctgaccgtcctag

SEQ ID NO: 8042 - DNA, 319 bp, synthetic construct
  misc_feature 1..319: note = Synthetic construct
  source 1..319: mol_type = other DNA
gacatccagatgacccagtctccttccattctgtctgcttctgtaggggatagagtcaccatcacttgccgggccaaccagagtgttggtatctggttggcttggtatcagcagaaaccgggaaaaggccctagtctcctaatatataagacgtctactttacaaagtggggtcccatcaaggttcagcggcagtggatctgggacagaattcactctcaccatcagcagcctgcagcctgatgattttgcaatttattattgccaacattataatacttatagggcgttcggcctagggaccaaggtggaaatcaaac

SEQ ID NO: 8043 - DNA, 340 bp, synthetic construct
  misc_feature 1..340: note = Synthetic construct
  source 1..340: mol_type = other DNA
gacatcgtgatgacccagtctccagactccctgcctgtgtctctgggcgagagggccaccatcaactgcaagtccagccagagtgttttcttcagctccaacaataggaactacttagcttggtatcagcaaagaccaggacagcctcctaacctcctcatttactgggcatctacccgggattccggggtccctgaccgattcagtggcagcgggtctgggacagatttcactctcaccatcagcagcctgcaggctgaagatgtggcagtttatttctgtcagcaatactatactactccgtacacttttggccaggggaccaagctggagatcaaac

SEQ ID NO: 8044 - DNA, 325 bp, synthetic construct
  misc_feature 1..325: note = Synthetic construct
  source 1..325: mol_type = other DNA
tcttctgagttggcccaggaccctgctgtgtctgtggccttggggcacacagtcacgatcacatgccgaggagacttcggcagcagttcttatgagagttggtaccgacagaagccgggacaagccccactcactgtcctgtatggaagatacatccggccctcagggatctcagaccgattccatggctccacagttggaaacacagcttccctgcatatcgccggggttcaggcggacgatgagggcacttatttctgttgcgcaatggacgtcaggagtcaccaggtgaaattcggcggcgggaccaagctcattgtcctaa

SEQ ID NO: 8045 - DNA, 322 bp, synthetic construct
  misc_feature 1..322: note = Synthetic construct
  source 1..322: mol_type = other DNA
gacatccagatgacccagtctccttccaccctgtctgcatctgtaggagacagagtcaccatcacttgccgggccagtcagagtattagtagctggttggcctggtatcagcagaaaccagggaaagcccctaagctcctgatctataaggcatctagtttagaaagtggggtcccatcaagattcagcggcagtggatctgggacagaattcactctcaccatcagcagcctgcagcctgatgattttgcaacttattactgccaacagtataatagttatctgtggacgttcggccaagggaccaaggtggaaatcaaac

SEQ ID NO: 8046 - DNA, 331 bp, synthetic construct
  misc_feature 1..331: note = Synthetic construct
  source 1..331: mol_type = other DNA
cagtctgccctgactcagcctgcctccgtgtctgggtctcctggacagtcgatcaccatctcctgcactggaagcagcagtgacgtcggttattataactatgtctcctggtaccaacaacacccaggcaaagcccccaaactcatgatttatgatgtcagtaatcggccctcaggggtttctaatcgcttctctggctccaagtctggcaacacggcctccctgaccatctctgggctccaggctgaggacgaggctgattattactgcagctcatatacaagcagcagcactcgggtcttcggaagtgggaccgaggtcaccgtcctag

SEQ ID NO: 8047 - DNA, 328 bp, synthetic construct
  misc_feature 1..328: note = Synthetic construct
  source 1..328: mol_type = other DNA
tcttctgagttgactcaggaccctgctgtgtctgtggccttgggacagacagtcaggatcacatgccaaggagacagcctcagaaggtattatgcaacgtggtaccaacagaagccaggacaggcccctgtacttgtcatgtataataaggacaatcggccctcagggatcccagaccgattctctggctccagctcagggaacacagcttccttgaccatcactggggctcaggcggaagatgaggctgactattactgtaactcctgggacaccagtggtaactatcccgtgatattcggcggagggaccaaactgaccgtcctag

SEQ ID NO: 8048 - DNA, 156 bp, synthetic construct
  misc_feature 1..156: note = Synthetic construct
  source 1..156: mol_type = other DNA
tttctaatcgcttctctggctccaagtctggcaacacggcctccctgaccatctctgggctccaggctgacgacgaggctgattattactgcacctcatatacaaacaacagcaattctcaggtattcggcggagggaccaagctgaccgtcctag

SEQ ID NO: 8049 - DNA, 319 bp, synthetic construct
  misc_feature 1..319: note = Synthetic construct
  source 1..319: mol_type = other DNA
gaaattgtgatgacgcagtctccagtcacgttgtctgtgtctccgggggaaagagtcgcgctctcctgcagggccagtcagagtgtcagcagcaacttagcctggtaccagcaaaaacctggccaggctcccacactcctcatctatggtgcatctctcagggccactggtgtcccagccaggttcagtggcagtgggtctgggacgcagttcactctcactatcagcagcctgcagtctgaagatttagccgtgtattactgtcaccaatatgacaccatgtacacttttggccaggggaccaagctggagatcaaac

SEQ ID NO: 8050 - DNA, 337 bp, synthetic construct
  misc_feature 1..337: note = Synthetic construct
  source 1..337: mol_type = other DNA
cagtctgtgctgacgcagccgccctcagtgtctggggccccagggcagagggtcaccatctcctgcactgggagcagctccaacatcggggcaggttatgatgtacactggtaccagcaccttccaggaacagcccccaaactcctcatctatggtaacatcaatcggccctcaggggtccctgaccgattctctggctccaagtctggcacctcagcttccctggccatcactgggctccaggctgaggatgaggctgattattactgccagtcctatgacagcagcctgagtgtcttttatgtcttcggaactgggaccaaggtcaccgtcctag

SEQ ID NO: 8051 - DNA, 325 bp, synthetic construct
  misc_feature 1..325: note = Synthetic construct
  source 1..325: mol_type = other DNA
gaaattgtgttgacgcagtctccaggcaccctgtctttgtctccagggggaagagccggtctctcctgcagggccagtcagagtgtttctaacgactacttagcctggtaccagcagagacctggccaggctcccaggctcctcatctatggtgcttccaccagggccactggcatcccagacaggttcggtggcagcgggtctgggacagacttcactctcaccatcagcagactggagcctgaagattttgcagtctatttctgtcaacagtatggcagttcgcctcagacgttcggccaagggaccaaagtagaaatcaatc

SEQ ID NO: 8052 - DNA, 325 bp, synthetic construct
  misc_feature 1..325: note = Synthetic construct
  source 1..325: mol_type = other DNA
ccctatgtgctgacgcagccaccctcggtgtcagtggccccaggacagacggccaggactacctgtgggggaaactacattgaaagtaaaagtgtgcactggtaccagcagaagccaggccaggcccctgtgttggtcctctctgatgataccgaccggccctcagggatccctgagcgattctctggctccagctctggcaacacggccaccctgatcatcagcgcggtcgaggccggggatgaggccgactattactgtcaggtgtgggatagtactggcgatcatgtggtcttcggcggagggaccaagctgaccgtcctag

SEQ ID NO: 8053 - DNA, 322 bp, synthetic construct
  misc_feature 1..322: note = Synthetic construct
  source 1..322: mol_type = other DNA
gacatccagatgacccagtctcctttcaccctgtctgcatctgtcggcgacagaatcaccatcacttgccgggccagtcagagtattaatagttggttggcctggtttcagcagaaaccagggaaagcccctaaactcctgatctatcagtcatcttctttagaaaatggggtcccatcaagattcagcggcagtgggtctgggacagacttcactctcaccatcagtagtctagagcctgaggattttgcagtttattactgtcagcagcgtggcgactggcctccgaccttcggccaagggaccaaggtggaaatcagac

SEQ ID NO: 8054 - DNA, 322 bp, synthetic construct
  misc_feature 1..322: note = Synthetic construct
  source 1..322: mol_type = other DNA
gatattgtgttgacacagtctccagccaccctgtctttgtctccaggagaaagagccaccctctcctgcagggccagtcagaatgttgacagttatttagcctggtaccaacagaaacctggccagtctcccagattcctcatctatgatgcgtccagcagggccactggcgtcccagccaggttcagtggcagtgggtctgggacagacttcactctcaccatcagtagtctagagcctgaggattttgcagtttattactgtcagcagcgtggcgactggcctccgaccttcggccaagggaccaaggtggaaatcagac

SEQ ID NO: 8055 - DNA, 122 bp, synthetic construct
  misc_feature 1..122: note = Synthetic construct
  source 1..122: mol_type = other DNA
cccctccacgacgctcttccgatctctcacactcctgcaggccgctgattattactgcacctcatatacaaacgacagcaattctcaggtattcggcggagggaccaagctgaccgtcctag

SEQ ID NO: 8056 - DNA, 337 bp, synthetic construct
  misc_feature 1..337: note = Synthetic construct
  source 1..337: mol_type = other DNA
cagtctgccctgactcagcctgcctccgtgtctgggtctcctggacagtcgatcaccatctcctgcactggaaccagcagtgacgttggtggttataactatgtctcctggtaccaacaacacccaggcaaagcccccaaactcatgatttatgatgtcagtaatcggccctcaggggtttctaatcgcttctctggctccaagtctggcaacacggcctccctgaccatctctgggctccaggctgaggacgaggctgattattactgcagctcatatacaagcagcagcactctcgatgtggtattcggcggagggaccaagctgaccgtcctag

SEQ ID NO: 8057 - DNA, 328 bp, synthetic construct
  misc_feature 1..328: note = Synthetic construct
  source 1..328: mol_type = other DNA
cagtctgccctgactcagcctccctccgcgtccgggtctcctggacagtcagtcaccatctcctgcactggaaccagcagtgacgttggtggttataactatgtctcctggtaccaacagcacccaggcaaagcccccaaactcatgatttatgaggtcagtaagcggccctcaggggtccctgatcgcttctctggctccaagtctggcaacacggcctccctgaccgtctctgggctccaggctgaggatgaggctgattattactgcagctcatatgcaggcagctctgtggtattcggcggagggaccaagctgaccgtcctag

SEQ ID NO: 8058 - DNA, 322 bp, synthetic construct
  misc_feature 1..322: note = Synthetic construct
  source 1..322: mol_type = other DNA
gaaattgtgttgacgcagtctccaggcaccctgtctttgtctccaggggaaagagccaccctctcctgcagggccagtcagagtgttagcagcagctacttagcctggtaccagcagaaacctggccaggctcccaggctcctcatctatggtgcatccagcagggccactggcatcccagacaggttcagtggcagtgggtctgggacagacttcactctcaccatcagcagactggagcctgaagattttgcagtgtattactgtcagcagtatggtagctcactcactttcggcggagggaccaaggtggagatcaaac

SEQ ID NO: 8059 - DNA, 319 bp, synthetic construct
  misc_feature 1..319: note = Synthetic construct
  source 1..319: mol_type = other DNA
gaaatagtgatgacgcagtctccagccaccctgtctgtgtctccaggggaaagagccaccctctcctgcagggccagtcagagtgttagcagcaacttagcctggtaccagcagaaacctggccaggctcccaggctcctcatctatggtgcatccaccagggccactggtatcccagccaggttcagtggcagtgggtctgggacagagttcactctcaccatcagcagcctgcagtctgaagattttgcagtttattactgtcagcagtataataactggcctcgtttcggcggagggaccaaggtggagatcaaac

SEQ ID NO: 8060 - DNA, 322 bp, synthetic construct
  misc_feature 1..322: note = Synthetic construct
  source 1..322: mol_type = other DNA
gaaatagtgatgacgcagtctccagccaccctgtctgtgtctccaggggaaagagccaccctctcctgctgggccagtcagagtgttggcagcaatttagcctggtaccagcacaaatctggccggcctcccaggctcctcatctatggtgcatcgaccagggccgctggtatcccagccaggttcagtggcagtgggtctgggacagagttcactctcaccatcagcagcctgcagtctgaagatcttgcagtttatgactgtcaacagtataataactggcctcgaacgttcggccaagggaccaaggtggaaatcaaac

SEQ ID NO: 8061 - DNA, 331 bp, synthetic construct
  misc_feature 1..331: note = Synthetic construct
  source 1..331: mol_type = other DNA
cagtctgttttggcgcagccgccctcagtgtctgcggccccaggacagagggtcaccatctcctgctctggaagcaactccaacattggatataattctgtatcctggtaccagcagttcccaggaacagcccccaaactcctcatttatggcaataacaatcgacagtcagggattcctgaccgattctctggctccaagtctggcacgtcagccaccctggacatcaccggactccagactgcggacgaggccgattattactgcggaacatatgatcgcagcctgagtgcttgggtgttcggcggagggaccaagctgaccgtcctag

SEQ ID NO: 8062 - DNA, 334 bp, synthetic construct
  misc_feature 1..334: note = Synthetic construct
  source 1..334: mol_type = other DNA
cagtctgccctgactcagcctgcctccgtgtctgggtctcctggacagtcgatcaccatctcctgcactggaaccaacagtgatgttgggaattataaccttgtctcctggtaccaaaaccacccaggcaaagcccccaaagtcttgatttatgagggcagtaagcggccctcaggggtttctaatcgcttctctggctccaagtctggcacgtcagccaccctggacatcaccggactccagactgcggacgaggccgattattactgcggaacatatgatcgcagcctgagtgcttgggtgttcggcggagggaccaagctgaccgtcctag

SEQ ID NO: 8063 - DNA, 331 bp, synthetic construct
  misc_feature 1..331: note = Synthetic construct
  source 1..331: mol_type = other DNA
cagtctgtgttgacgcagccgccctcagtgtctgcggccccaggacagaaggtcaccatctcctgctctggaagcaactccaacattggaaataattatgtctcctggtatcagcaactcccaggaaaagccccccgactcctaatttatgacagtaataagcgaccctcagagattcctgaccgattctctggctccaagtctgacacgtcaggcaccctggacatcaccggactccagaccggggacgaggccgattattactgcggaacatgggatgccgaattgagagcgagggtgttcggcggagggaccagactgaccgtcctag

SEQ ID NO: 8064 - DNA, 331 bp, synthetic construct
  misc_feature 1..331: note = Synthetic construct
  source 1..331: mol_type = other DNA
tcctatgtactgactcagccaccctcggtgtcagtggccccaggacagacggccaggattacctgtgggggaagcaacatcgaaactaaacctgtgcactggtaccggcagaggtcaggccaggcccctgtactggtcgtctatgatgatagcgaccggccctcagggattcctgagcgagtgtctggctccaactttgggaacacggccaccctgaccatcaccacggtcgaagccggggatgaggccgactacttctgtcaggtgtgggatagcagtagtgatcctccgtgtgtggtgttcggcggagggaccaagctgaccgtcctac

SEQ ID NO: 8065 - DNA, 322 bp, synthetic construct
  misc_feature 1..322: note = Synthetic construct
  source 1..322: mol_type = other DNA
gacatccagatgacccagtctccatcctccctgtcagcctctgtaggagacagagtcaccatcacttgccgggcaagtcagagcattggcacctatttaaattggtatcggcagaaaccagggaaagcccctaagctcctcatctatgctgcatccactttgcagagtggggtcccatcaaggctcagtggcagtggatctgggacagaattcactctcaccatcaccagtctgcaacctgaagactttgcagcttactactgtcaacagagttacaatatcccgtacacctttggccaggggaccaagctggagatcagac

SEQ ID NO: 8066 - DNA, 328 bp, synthetic construct
  misc_feature 1..328: note = Synthetic construct
  source 1..328: mol_type = other DNA
gagattgtgttgacgcagtctccaggcaccctgtctttgtctccaggtgaccgagccaccatctcctgtagggccagtcagcatgttcgcacgaccatgttggcctggtatcaacaaaaacctggccagtctcccaccctcctcatctatggtgtgtccgacagggccactggcatcccagacaggttcagaggcagtggctatgggacagagttcactctcaccatcaccagactggagcctgaagactttgccgtatattactgtcaacactatgcttactcaccaccgtggacgttcggccaagggaccagggtggaagtcaaac

SEQ ID NO: 8067 - DNA, 316 bp, synthetic construct
  misc_feature 1..316: note = Synthetic construct
  source 1..316: mol_type = other DNA
gacatccagatgacccagtctccttccaccctgtctgcatctgtaggggacagagtcaccatcacttgccgggccagtcggagtgttagtggctggttggcctggtatcagcagaaaccagggaaagcccctaagctcctgatctatgaggcgtctcatttaggaggtggggtcccatcgaggttcagcggcagtggatttgggacagaattcacgctcaccatcagcagcctgcagcctgatgattttgcgatttattactgccaacagtataatagttacacttttggccaggggaccaagttggagatcaaac

SEQ ID NO: 8068 - DNA, 331 bp, synthetic construct
  misc_feature 1..331: note = Synthetic construct
  source 1..331: mol_type = other DNA
cagtctgccctgactcagcctgcctccgtgtctgggtctcctggacagtcgatcaccatctcctgcactggaaccagcagtgacgttgatgattataagtttgtctcctggtaccaacaacacccaggcaaagcccccaaagtcatgatttatgaagtcagtaatcgggccccaggggtttctaatcgcttctctggctccaagcttggcaacacggcctccctgaccatctctgggctccagactgaggacgaggctgattatttctgcagctcatatacaaccaggattccttgtgtcttcggagctgggaccaaggtcaccgtcctag

SEQ ID NO: 8069 - DNA, 334 bp, synthetic construct
  misc_feature 1..334: note = Synthetic construct
  source 1..334: mol_type = other DNA
cagcctgtgctgactcaatcatcctctgcctctgcttccctgggatcctcggtcaagctcacctgcactctgagcagtgggcacagtagctacatcatcgcatggcatcagcagcagccagggaaggcccctcggtacttgatgaaacttgatggtagtggaagctacaacaaggggagcggagttcctgatcgcttctcaggctccagctctggggctgaccgctacctcaccatctccaacctccagtctgaggatgaggctgatttttactgtgagacctgggacagttacactcaggtgttcggcggagggaccaagctgaccgtcctag

SEQ ID NO: 8070 - DNA, 340 bp, synthetic construct
  misc_feature 1..340: note = Synthetic construct
  source 1..340: mol_type = other DNA
gacatcgtgatgacccagtctccagactccctgtctgtgtctctgggcgagagggccaccatcaactgcaagtccagccagagtgtcttatatggctccagcaataagaactacttagcttggtatcagcagaaaccaggacagcctcctaagcttctccttaactgggcatctacccgggaatttggggtccctgaccgattcagtggcagcgggtctgggagagatttcactctcaccatcagcagcctgcaggctgaagatgtggcagtttattactgtcagcaatattttaattctcccatcaccttcggccaagggacacgactggagattaaac

SEQ ID NO: 8071 - DNA, 322 bp, synthetic construct
  misc_feature 1..322: note = Synthetic construct
  source 1..322: mol_type = other DNA
gacatccagatgacccagtctccttccaccctgtctgcatctgtaggagacagagtcaccatcacttgccgggccagtcagagtattagttcctggttggcctggtatcagcaaaaaccagggaaagcccctaagctcctgatctataaggcgtctactttagaaagtggggtcccatcaaggttcagcggcagtggatctgggacagaattcactctcaccatcagcagcctgcagcctgatgattttgcaacttattactgccaacaatataatagttacatgtacacttttggccaggggaccaagctggagatcaaac

SEQ ID NO: 8072 - DNA, 322 bp, synthetic construct
  misc_feature 1..322: note = Synthetic construct
  source 1..322: mol_type = other DNA
gacatccagatgacccagtctccatcctccctgtcggcatctgtaggagacagagtcaccatcacctgccgggcgagtcagggcattagcaattatttagcctggtatcagcagaaaccagggaaggcccctaacctcctgatctatgctgcatccactttgcaatctggggtcccatctcggttcagtggcagtggatctgggacagatttcactctcaccatcagcagcctgcagcctgaggatattgcaacttattactgtcaaaagtataaccgtgccccccacacttttggccaggggaccaacgtggagatcaaac

SEQ ID NO: 8073 - DNA, 322 bp, synthetic construct
  misc_feature 1..322: note = Synthetic construct
  source 1..322: mol_type = other DNA
gacatccagatgacccagtctccttccaccctgtctgcatctgtaggagacagagtcaccatcacttgccgggccagtcagagtattagtagctggttggcctggtatcagcagaaaccagggaaagcccctaaactcctgatctataaggcgtctactttagaaagtggggtcccatcaaggttcagcggcagtggatctgggacagaattcactctcaccgtcagcagcctgcagcctgatgattttgcaacttattactgccaacagtataatagttattcgtggacgttcggccaagggaccagggtggaaatcaaaa

SEQ ID NO: 8074 - DNA, 322 bp, synthetic construct
  misc_feature 1..322: note = Synthetic construct
  source 1..322: mol_type = other DNA
gtcatccagatgacccagtctccatcctcactgtctgcgtctgtaggagacagcgtcaccatcacttgccgggcgagtcaggacattagcaattatttagcctggtttcagcagaaaccagggagagcccctaagtccttgatctctggagcgtcaagtttgcacgggggggtctcatcaaggtttggtggcagtggatccgggacagaattcactctcaccatcaacagcctgcagcctgaagattttgcaacttattactgccaacagtatgatagttatcctcgaacgttcggccaggggaccacggtggaaatcaaag

SEQ ID NO: 8075 - DNA, 322 bp, synthetic construct
  misc_feature 1..322: note = Synthetic construct
  source 1..322: mol_type = other DNA
gacatccagatgacccagtctccttccaccctgtctgcatctgtaggagacagagtcaccatcacttgccgggccagtcagagtattagtgcctggctggcctggtatcagcagaaaccggggaaagcccctaaactcctgatctctggggcctctaatttggagtatggggtccctgcaaggttcagcggcagtggatctgggacacacttcactctcaccatcaggagcctgcagcctgatgattttgcaacttattactgccaacaatataatatctatccggaaacgttcggccaagggaccagggtggaaatcagac

SEQ ID NO: 8076 - DNA, 325 bp, synthetic construct
  misc_feature 1..325: note = Synthetic construct
  source 1..325: mol_type = other DNA
caaattgtgttgacacagtctccagccaccctgtctttgtctccaggggaaagagtcaccctctcctgcagggccagtcagagtattagaagctacttagcctggtaccaacagaaacctggccaggctcccagcctcctcatctttggtgcatccaacagggccactggcgtcccagccaggttcagtggcagtgggtctgggacagacttcactctcaccatcagcagcctagagcctgaagattttgcagtttattactgtcagcaccgtagcaactggcctccgtacacttttggccaggggaccaagctggagatcaaac

SEQ ID NO: 8077 - DNA, 331 bp, synthetic construct
  misc_feature 1..331: note = Synthetic construct
  source 1..331: mol_type = other DNA
caggctgtggtgactcaggagccctcgctgactgtgtcccctggagggacagtcactctcacctgtggctccagcactggagctgtcaccagtggtcattatccctactggttccagcagaaacctggccaagcccccaggactctaatttatgatacaactaacagaaactcctggacacctgcccggttctcaggctccctccttgggggcaaagctgccctgaccctttcgggtgcgctgcctgacgatgaggctgaatattactgcttactcgcctttggtggtgtccggtgggtgttcggcggagggaccaagctgaccgtcctag

SEQ ID NO: 8078 - DNA, 334 bp, synthetic construct
  misc_feature 1..334: note = Synthetic construct
  source 1..334: mol_type = other DNA
cagtctgccctgactcagcctgcctccgtgtctgggtctcctggacagtcgatcaccatctcctggaatggaaccagcagtgacgttggtggttataactatgtctcctggtaccaacaaaacccaggcaaagcccccaaagtcatgatttatgatgtcagtaatcggccctcagggatttctaatcgcttctctggctccaagtctggcaacacggcctccctgaccatctctgggctccaggctgacgacgaggctgattattactgcacctcatatacaaacgacaccaattctcaggtattcggcggagggaccaagctgaccgtcctag

SEQ ID NO: 8079 - DNA, 334 bp, synthetic construct
  misc_feature 1..334: note = Synthetic construct
  source 1..334: mol_type = other DNA
cagtctgtgctgacgcagccgccctcagtgtctggggccccagggcagagggtcaccatctcctgcactgggagcagttccaacatcggggcagcttatgatgtacactggtaccagcaccttccaggaacagcccccaaactcctcatctatgctaacagcaatcggccctcaggggtccctgaccgattctctggctccaagtctggcacctcagcctccctggccatcactgggctccaggctgaggatgaggctgattattactgccagtcctatgacagccgcctgagtggttatgtcttcggaaccgggaccaaggtcaccgtcctag

SEQ ID NO: 8080 - DNA, 319 bp, synthetic construct
  misc_feature 1..319: note = Synthetic construct
  source 1..319: mol_type = other DNA
gacatccagatgacccagtctccatcctccctgtctgcatctgtaggagacagagtcaccatcacttgccaggcgagtctggacatcagcaactttttaaattggtatcagcagaaaccagggaaagcccctaaactcctgatctacgatacatccaatttggaaagaggggtcccatcaaggttcagtggaagtggatctgggacagattttaatttaaccatcaccagcctgcagcctgaagatattgcaacatattactgtcaacagtatgataatctgatcaccttcggccaagggacacgtctggagattaaac

SEQ ID NO: 8081 - DNA, 319 bp, synthetic construct
  misc_feature 1..319: note = Synthetic construct
  source 1..319: mol_type = other DNA
gacatccagatgacccagtctccttccaccctgtctgcatctgtaggagacagagtcaccatcacttgccgggccagtcagagtattagtagctggttggcctggtatcagcagaaaccagggaaagcccctaagctcctgatctataaggcgtctagtttagaaagtggggtcccatcaaggttcagcggcagtggatctgggacagaattcactctcaccatcagcagcctgcagcctgatgattttgcaacttattactgccaacagtataatagttattcaactttcggcggagggaccaaggtggagatcaaac

SEQ ID NO: 8082 - DNA, 322 bp, synthetic construct
  misc_feature 1..322: note = Synthetic construct
  source 1..322: mol_type = other DNA
gacatccagatgacccagtctccttccaccctgtctgcatctataggagacagagtcaccatcacttgccgggccagccacagtattagttcgtggttggcctggtatcagcacaaaccagggaaagcccccaagctcctgatctataaggcgtctactttagaaagtggggtcccatctaggttcagcggcagtggctctgggacagaattcactctcaccatcagcagcctgcagcctgatgattttgcaacttatttctgccaacaatataatagtgtcttatacacttttggccaggggaccaagctggagatcaaac

SEQ ID NO: 8083 - DNA, 337 bp, synthetic construct
  misc_feature 1..337: note = Synthetic construct
  source 1..337: mol_type = other DNA
gacattgtgatgactcagaccccgctctccctgtccgtcacccttggacaggcggcctccttctcctgcacgtctagtcaaagtgtcgttcgcagtgatgggatcacctacttgagctggtttcaccagaggccaggccaatctccaaggcgcctgatttatatggtttctaaccgggactctggggccccggacagattcagcggcagtgggtcagtcactgatttcacactgaaaatcagcagggtagaggctgaagatgttggaatttattactgcatgcaaggtgcgcagtggcccccgacgttcggccaagggaccaaggtggagatcaaac

SEQ ID NO: 8084 - DNA, 325 bp, synthetic construct
  misc_feature 1..325: note = Synthetic construct
  source 1..325: mol_type = other DNA
gaaattgtgttgacgcagtctccaggcaccctgtctttgtctccaggggaaagagccagtctctcctgcagggccagtcagagtgttggtagcgactacttagcctggtaccaacttaaacctggccaggctcccaggctcctcatctctggtgcatccaccagggccgcaggcatcccagacaggttcagtggcagcgggtctgggacagacttcactctcaccatcagcagactggaacctgaagatttcgcagtatattactgtcaccagtatggcagttcgcgtcagacgttcggccaagggaccaaggtggaaatcaaac

SEQ ID NO: 8085 - DNA, 328 bp, synthetic construct
  misc_feature 1..328: note = Synthetic construct
  source 1..328: mol_type = other DNA
cagtctgccctgactcagcctacctccgtgtctgggtctcctggacagtcgatcaccatctcctgcactgccaccaccggtgacattggaggtcttatctcctggtatcagcaatacccaggggaagcccccgaactcattatttttgacgtcattaatcggccctctggcatctctaagcgtttctctggctccaagtctggcaacacggcctccctcaccatctctaggctccagcctgaggacgaggctgattactactgctcctcatattcgcgcagcagcgattcttatgtcttcggaagtccgaccacggtcatcgtccttg

SEQ ID NO: 8086 - DNA, 343 bp, synthetic construct
  misc_feature 1..343: note = Synthetic construct
  source 1..343: mol_type = other DNA
tccatcgtgatgacccagtctccagagtccctagatgtgtctctgggcgagagggccaccatccactgcaagtccagccacagtgtcttatctaatttgaataataaggattacttggcttggtaccagcaaaagccgggacagccccctaagttgctcatttactgggcttctacccgggattccggggtccctgaccgattcagtggcagcggatctgggacagatttcactctcacaatcagaggcgtgcaggctgaagatgtggcagtctattactgtcagcaatattataccagtcctccgtatactttcggcccggggaccaagctgcacgtcaaac

SEQ ID NO: 8087 - DNA, 319 bp, synthetic construct
  misc_feature 1..319: note = Synthetic construct
  source 1..319: mol_type = other DNA
gacatccagatgacccagtctccttccaccctgtctgcatctgtaggagacagagtcaccatcacttgccgggccagtcagagtattactagctggttggcctggtatcagcagaaaccagggaaagcccctaaactcctaatctatcaggcgtctaatttacaaagtggggtcccatcaaggttcagcggcagtgggtctgggacagaattcactctcaccgtcaccagcctgcagcctgatgattttgcaacttactactgccaacaatatcaaagttattcttctttcggcggagggaccaaggtggagctcaaac

SEQ ID NO: 8088 - DNA, 334 bp, synthetic construct
  misc_feature 1..334: note = Synthetic construct
  source 1..334: mol_type = other DNA
cagtctgccctgactcagcctgcctccgtgtctgggtctcctggacagtcgatcaccatctcctgcactggaaccagcagtgacgttggtggttataactatgtctcctggtaccaacaaaacccaggcaaagcccccaaactcatgatttatgatgtcaataatcggccctcagggatttctaatcgcttctctggctccaagtctggcaacacggcctccctgaccatctctgggctccaggctgacgacgaggctgattattactgcacctcatatacaaacgacaccaattctcaggtattcggcggagggaccaagctgaccgtcctag

SEQ ID NO: 8089 - DNA, 334 bp, synthetic construct
  misc_feature 1..334: note = Synthetic construct
  source 1..334: mol_type = other DNA
cagtctgccctgactcagcctgcctccgtgtctgggtctcctggacagtcgatcaccatctcctgcactggaaccaacagtgatgttgggagttataaccttgtctcctggtaccaaaaccacccaggcaaagcccccaaagtcttgatttatgagggcagtaagcggccctcaggggtttctaatcgcttctctggctccaagtctggcaacacggcctccctgaccatctctgggctccaggctgacgacgaggctgattattactgcacctcatatacaaacgacaccaattctcaggtattcggcggagggaccaagctgaccgtcctag

SEQ ID NO: 8090 - DNA, 322 bp, synthetic construct
  misc_feature 1..322: note = Synthetic construct
  source 1..322: mol_type = other DNA
gaaatagtgttgacgcagtctccagccaccctgtctatgtctccaggggaaagagccaccctctcctgcagggccagtcagagtgtcggttcctccttcgcctggtaccagcagaagcctggccaggctcccaccctcctcatctctgctgcatccttcagggccaccggtgtttctcccaggttcagtgccagtggggctggggcggatttcactctcaccatcagcagactgcagtctgaggattctgcagtctacttttgtcatcaatattatgactggccgtggacgttcggccaagggaccaaggtggaaatcaagc

SEQ ID NO: 8091 - DNA, 325 bp, synthetic construct
  misc_feature 1..325: note = Synthetic construct
  source 1..325: mol_type = other DNA
gaaatagtgatgacgcagtctccagtcaccctgtctgtgtctccaggggaaagagtcaccctctcctgtagggccaatcggagtatcagcaccaacttggcctggtatcagcagaaacctggccaggctcccagtctcctcatctatgatgcttctgccagggccgctggtgtcccagccaggttcagtgccagtgggtctgggacagagttcactctcaccatcagcagtctgcagtctgaagattttgcaaaatattactgtcagcactataataagtggccccctttcactttcggcccggggaccaaggtggaaatcaagc

SEQ ID NO: 8092 - DNA, 331 bp, synthetic construct
  misc_feature 1..331: note = Synthetic construct
  source 1..331: mol_type = other DNA
cagtctgccctgactcagcctgcctccgtgtctgggtctcctggacagtcgatcaccatctcctgcactggaaccagcagtgacgttggtggttataactatgtctcctggtaccaacaacacccaggcaaagcccccaaactcatgatttatgatgtcagtaatcggccctcaggggtttctaatcgcttctctggctccaagtctggcaacacggcctccctgatcatctctgggctccaggctgaggacgaggctgattattactgcagctcatatacaaccagcaacactctggtattcggcggagggaccaagctgaccgtcctag

SEQ ID NO: 8093 - DNA, 325 bp, synthetic construct
  misc_feature 1..325: note = Synthetic construct
  source 1..325: mol_type = other DNA
gaaatagtgatgacgcagtctccagccaccctgtctgtgtctccaggggaaagagccaccctctcctgcagggccagtcagagtgttagcagcaacttagcctggtaccagcagaaacctggccaggctcccaggctcctcatctatggtgcatccaccagggccactggtatcccagccaggttcagtggcagtgggtctgggacagagttcactctcaccatcagcagcctgcagtctgaagattttgcagtttattactgtcagcagtataataactggcctccgttcactttcggccctgggaccaaagtggatatcaaac

SEQ ID NO: 8094 - DNA, 325 bp, synthetic construct
  misc_feature 1..325: note = Synthetic construct
  source 1..325: mol_type = other DNA
gacatccagatgacccagtctccatcctccctgtctgcatctgtaggagacagagtcaccatcacttgccgggcaagtcagagcattagcagctatttaaattggtatcagcagaaaccagggaaagcccctaagctcctgatctatgctgcatccagtttgcaaagtggggtcccatcaaggttcagtggcagtggatctgggacagatttcactctcaccatcagcagtctgcaacctgaagattttgcaacttactactgtcaacagagttacagtacccctcggatcactttcggccctgggaccaaagtggatatcaaac

SEQ ID NO: 8095 - DNA, 325 bp, synthetic construct
  misc_feature 1..325: note = Synthetic construct
  source 1..325: mol_type = other DNA
gacatccagatgacccagtctccatcctccctgtctgcatctgtaggagacagagtcaccatcacttgccgggcgagtcagggcattagcaattctttagcctggtatcagcagaaaccagggaaagcccctaagctcctgctctatgctgcatccagattggaaagtggggtcccatccaggttcagtggcagtggatctgggacggattacactctcaccatcagcagcctgcagcctgaagattttgcaacttattactgtcaacagtattatagtacccctccgctcactttcggcggagggaccaaggtggagatcaaac

SEQ ID NO: 8096 - DNA, 322 bp, synthetic construct
  misc_feature 1..322: note = Synthetic construct
  source 1..322: mol_type = other DNA
gacatccagatgacccagtctccatcctccctgtctgcatctgtaggagacagagtcaccatcacttgccgggcaagtcagagcattagcagctatttaaattggtatcagcaaaaaccagggaaagcccctaagctcctgatctatgctgcatccagtttgcaaagtggggtcccatcaaggttcagtggcagtggatctgggacagatttcactctcaccatcagcagtctgcaacctgaagattttgcgacttactactgtcaacagagttacttgaacaggtggacgttcggccaagggaccaaggtggaaatcaaac

SEQ ID NO: 8097 - DNA, 325 bp, synthetic construct
  misc_feature 1..325: note = Synthetic construct
  source 1..325: mol_type = other DNA
tcctatgagctgacacagccaccctcggtgtcagtgtccccaggacaaccggccaggatcacctgctctggagatgcattgccaaagaaatttgcttattggtaccagcagaagtcaggccaggcccctgtgctggtcatccatgaggacaacaaacgaccctccgggatccctgagagattctctggttccagctcagggacagtggccaccttgactatcagtggggcccaggtggaggatgaaggtgactactactgttattcaacagacagcagtggtactcatagggtattcggcggagggaccacgctgaccgtcctag

SEQ ID NO: 8098 - DNA, 325 bp, synthetic construct
  misc_feature 1..325: note = Synthetic construct
  source 1..325: mol_type = other DNA
gacatccagttgacccaatctccatcctccctgtctgcatctgtaggagacagagtcaccatcacttgccaggcgagtcaggacattaagaactatttaaactggtatcaacataaaccagggaaagccccaaaactcctgatcttcgatgcatccttattgcaagcaggggtcccatcaaggttcagtggaagtggatctgggacccattttactttcaccatcagtagcctgcagcctgaagacgttgcaacatattactgtcaacaatatgaaattctgcctcggttcactttcggccctgggaccaaagtggatctcaaac

SEQ ID NO: 8099 - DNA, 322 bp, synthetic construct
  misc_feature 1..322: note = Synthetic construct
  source 1..322: mol_type = other DNA
gacatccagatgacccagtctccatcctcactgtctgcatctgtaggagacagagtcaccatcacttgtcgggcgagtcagggcattagcaattatttagcctggtttcagcagaaaccagggaaagcccctaagtccctgatctatggtgcatccagtttgcaaagtggggtcccgtcaaagttcagcggcagtggatctgggacagatttcactctcaccatcaccagcctgcagcctgaagattttgcaacttattactgccaacagtataatagttaccctttcactttcggccctgggaccaaagtggatctcaaac

SEQ ID NO: 8100 - DNA, 325 bp, synthetic construct
  misc_feature 1..325: note = Synthetic construct
  source 1..325: mol_type = other DNA
gaaacagtgatgacgcagtctccagccaccctgtctgtgtctccaggggaaagagtcaccctctcctgcagggccagtcagagtgttagtagcaacttagcctggtaccagcagagacctggccaggctcccaggctcctcatctctggtgcatctaccagggccactggtgtcccaggcagattcagtggcggtgggtctgggacagagttcactctcaccatcagcggcctgcagcctgaagattttgcagtttattactgtcagcagtataagaactggcctccgaacacttttggccaggggaccaaggtggaatccaaac

SEQ ID NO: 8101 - DNA, 325 bp, synthetic construct
  misc_feature 1..325: note = Synthetic construct
  source 1..325: mol_type = other DNA
gaaattgtgttgacgcagtctcctggcaccctgtctttgtctccaggacaaagagccaccctctcctgcagggccagtcagagtgtaaatggcaactacttagcctggtacaagcagatgcctggccaggctcccaggctcctcatctatggtacatccagcagggccactggcgttccagacaggttcagtggcagtgggtctgggacagacttcactctcaccatcggcagcctggagcccgcagattttgcaatatatttctgtcagcagtatggtaactcacagatcacgttcggccaagggacacgactggagattaaac

SEQ ID NO: 8102 - DNA, 322 bp, synthetic construct
  misc_feature 1..322: note = Synthetic construct
  source 1..322: mol_type = other DNA
gaagttgtgctgactcagtctccagactttcagtctgtgactccaaaggagaaagtcaccatcacctgccgggccagtcagagcattggtattagcttacactggtaccagcagaaaccaaatcagtctccaaaggtcctcatcaaatatgcttcccagtccatcccaggggtcccctcgaggttcagtggcagtggatctgggacagatttcaccctcaccatcaatagcctggaagctgaagatgctgcaacgtattactgtcatcagagttatactttagcgaacacttttggccaggggaccaagctggagatcaaac

SEQ ID NO: 8103 - DNA, 322 bp, synthetic construct
  misc_feature 1..322: note = Synthetic construct
  source 1..322: mol_type = other DNA
gacatccagatgacccagtctccatcttccgtgtctgcatctgtaggagacagagtcaccattacttgtcgggcgagtcagggtattagcagctggttagcctggtatcaacagaaaccagggaaagcccctaagctcctgatctatgctgcatccagtttgcaaagtggggtcccatcaaggtttagcggcagtggatctgggacagatttcactctcaccatcagcagcctgcagcctgaagattttgcaacttactattgtcaacaggctaacagtttcccaatcaccttcggccaagggacacgactggagattaaac

SEQ ID NO: 8104 - DNA, 328 bp, synthetic construct
  misc_feature 1..328: note = Synthetic construct
  source 1..328: mol_type = other DNA
gacatccagatgacccagtctccatcctccctgtctgcatctgtgggagccagagtcaccttcacttgccgggcaagtcagaacattaacagcaatttaaattggtatcaacagagacctgggaaagcccctcagctcctgatctatgctgcatccactttgcaaagtggggtcccttcaaggttcagtggcagtggatctgggacagatttcactctcaccatcagcagtctgcaacctgaagattctgcaacctactactgtcaacagagttacagtgcccctccggtgtacagttttggccaggggaccaagctggagatcaaac

SEQ ID NO: 8105 - DNA, 325 bp, synthetic construct
  misc_feature 1..325: note = Synthetic construct
  source 1..325: mol_type = other DNA
gaaattgtgttgacgcagtctccaggcaccctgtctttgtctccaggggaaagagccaccctctcctgcagggccagccagagtgttagcagcaactacttagcctggtaccagcagaaacctggccaggctcccaggctcctcatctatgatgcatccaccagggccactggcgtcccagacaggttcagtggcagtgggtctgggacagacttcactctcagcatcagaggagtgcagcctgaggattctgcagtgtattactgtcagcagtatggtacctcacctctgacgttcggccaagggaccaaggtggaaatcaaac

SEQ ID NO: 8106 - DNA, 340 bp, synthetic construct
  misc_feature 1..340: note = Synthetic construct
  source 1..340: mol_type = other DNA
gacatcgtgatgacccagtctccagactccctggctgtgtctctgggcgagagggccaccatcaactgcaagtccagccagagtgttttatacaactccaacaataagaactacttagcttggtatcagcgcaaaccaggacagcctcctaagttgctcatttactgggcatctacccgggaatccggggtccctgaacgattcagtggcagcgggtctgggacagatttcactctcaccatcagcagcctgcaggctgaagatgtggcagtttattactgtcagcaatattttggtactcctctcactttcggcggagggaccaaggtggagatcaaac

SEQ ID NO: 8107 - DNA, 319 bp, synthetic construct
  misc_feature 1..319: note = Synthetic construct
  source 1..319: mol_type = other DNA
gacatccagatgacccagtctccttccaccctgtctgcatctgtaggagacagagtcaccatcacttgccgggccagtcagagtattagtagctggttggcctggtatcagcagaaaccagggaaagcccctaagctcctgatctataaggcgtctagtttagaaagtggggtcccatcaaggttcagcggcagtggatctgggacagaattcactctcaccatcagcagcctgcagcctgatgattttgcaacttattactgccaacagtataatagttatccgacgttcggccaagggaccaaggtggaaatcaaac

SEQ ID NO: 8108 - DNA, 331 bp, synthetic construct
  misc_feature 1..331: note = Synthetic construct
  source 1..331: mol_type = other DNA
cagtctgccctgactcagcctgcctccgtgtctgggtctcctggacagtcgatcaccatctcctgcactggaaccagcagtgatgttgggagttataaccttgtctcctggtaccaacagcacccaggcaaagcccccaaactcatgatttatgagggcagtaagcggccctcaggggtttctaatcgcttctctggctccaagtctggcaacacggcctccctgacaatctctgggctccaggctgaggacgaggctgattattactgctgctcatatgcaggtagtagcactttcgtcttcggaactgggaccaaggtcaccgtcctag

SEQ ID NO: 8109 - DNA, 325 bp, synthetic construct
  misc_feature 1..325: note = Synthetic construct
  source 1..325: mol_type = other DNA
tcctatgagctgacacagccaccctcggtgtcagtgtccccaggacagacggccaggatcacctgctctggagatgtattgccaaagcaatatgcttattggtaccagcagaagccaggccaggcccctgtgctggtgatatataaagacagagagaggccctcagggatccctgagcgattctctggctccagctcagggacaacagtcacgttgaccatcagtggagtccaggcagaagacgaggctgactattactgtcaatcagcagacagcagtggtacttatgtggtattcggcggagggaccaggctgaccgtcgtag

SEQ ID NO: 8110 - DNA, 322 bp, synthetic construct
  misc_feature 1..322: note = Synthetic construct
  source 1..322: mol_type = other DNA
gacatccagatgacccagtctccatctgccatgtctgcatctgtaggagacagagtcaccatcacttgtcgggcgagtcagggcattagcaattatttagcctggtttcagcagaaaccagggaaagtccctaagcgcctgatctatgctgcatccagtttgcaaagtggggtcccatcaaggttcagcggcagtggatctgggacagaattcactctcacaatcagcagcctgcagcctgaagattttgcaacttattactgtctacagcataatagttatccgtggacgttcggccaagggaccaaggtggaaatcaaac

SEQ ID NO: 8111 - DNA, 334 bp, synthetic construct
  misc_feature 1..334: note = Synthetic construct
  source 1..334: mol_type = other DNA
cagtctgccctgactcagcctgcctccgtgtctgggtctcctggacagtcgatcaccatctcctgcactggaaccagcagtgacgttggtgcttataactatgtctcctggtaccaacaaaagccaggcaaagcccccaaactcatgatttatgatgtcagtaatcggccctcagggatttctaatcgcttctctggctccaagtctggcaacacggcctccctgaccatctctgggctccaggctgacgacgaggctgattattactgcacctcatatacaaacaacagcaattctcaggtattcggcggagggaccaagctgaccgtcctag

SEQ ID NO: 8112 - DNA, 334 bp, synthetic construct
  misc_feature 1..334: note = Synthetic construct
  source 1..334: mol_type = other DNA
cagtctgccctgactcagcctgcctccgtgtctgggtctcctggacagtcgatcaccatctcctgcactggaaccaacagtgatgttgggagttataaccttgtctcctggtaccaaaaccacccaggcaaagcccccaaactcttgatttatgcgggcagtaagcggccctcaggggtttctaatcgcttctctggctccaagtctggcaacacggcctccctgaccatctctgggctccaggctgacgacgaggctgattattactgcacctcatatacaaacaacagcaattctcaggtattcggcggagggaccaagctgaccgtcctag

SEQ ID NO: 8113 - DNA, 319 bp, synthetic construct
  misc_feature 1..319: note = Synthetic construct
  source 1..319: mol_type = other DNA
tcctatgacctgactcagccgccctccgtgtccgtgtcccctggacagagagccaccatcacctgctctggagataatttgggggacaaatatatttcatggtatcaacagaagccaggccagtcccctctattggtcatctatcaagatactcggcggccctcagggatcccagagcgattctctggctccaattctgggaaagcggcctctctgaccatcagcgggacccaggctatggatgaggctgactattactgtcaggcgtgggacacaagcgctgcgattttcggcggagggaccaagctgaccgtccttg

SEQ ID NO: 8114 - DNA, 322 bp, synthetic construct
  misc_feature 1..322: note = Synthetic construct
  source 1..322: mol_type = other DNA
tcttctgagctgactcaggaccctgctgtgtctgtggccctgggccagacagtcaggatcgcatgccaaggagacagcctcagaagttattttgcaaactggtaccagcagaagccaggacaggcccctaaacttatcctctatggtaataataaccggccctcagggatcccagaccgcttctctggctccaactcaggagacacagcttccttgaccatcactggggctcaggcggaagatgaggccgactattactgtaactcccgttacagcagtgcttaccaggtgttcggcggagggaccaagttgaccgtcctag

SEQ ID NO: 8115 - DNA, 322 bp, synthetic construct
  misc_feature 1..322: note = Synthetic construct
  source 1..322: mol_type = other DNA
gacatccagataacccagtctccatcctccctgtctgcatctgtaggagacagagtcaccatcacttgtcgggcgagtcacgacattgacaactatttaaattggtatcagcagaaaccagggaaagcccctaagctcctgatctacgatgcatccaatttggaaacaggggtcccatcaaggttcagtggaagtggatctgggacagattttactttcaccatcagcgtcctgcagcctgaagatattgcaacatatttctgtcagcagtgtgataatctccctttcactttcggcggagggaccaaggtggagatcaaac

SEQ ID NO: 8116 - DNA, 322 bp, synthetic construct
  misc_feature 1..322: note = Synthetic construct
  source 1..322: mol_type = other DNA
gacatccagatgacccagtctccatcctcactgtctgcatctgtaggagacagagtcaccatgacttgtcgggcgagtcaggccattagccataatttagcctggtttcagcagaaaccagggaaagcccctaagtccctgatctatgctgcatccagtttgcaaagtggggtcccatcaaagttcagcggcaatggatctgggtcagatttcactctcaccatcagcagcctgcagcctgaagattttgcaacttattactgccaacaatataatagtttcccgtacacttttggccaggggaccaagctggagatcaaac

SEQ ID NO: 8117 - DNA, 336 bp, synthetic construct
  misc_feature 1..336: note = Synthetic construct
  source 1..336: mol_type = other DNA
gagattgtgatgacccagactccgctctccttgtctatcacccctggagagcaggcctccatgtcctgcaggtctagtcagagcctcctgcatagtgatggatacacctatttgtattgctttctgcagaaatgcaggccagtctccacactcctgatctatgaagtttccacccggttctctggagtgccagataggttcagtggcagcgggtcagggacagatttcacactgaaaatcagccgggtggaggctgaggatgttggaattattattgcatgcaagatgcacaggatctgtggacgttcggccaagggaccaaggtggaaatcaaac

SEQ ID NO: 8118 - DNA, 343 bp, synthetic construct
  misc_feature 1..343: note = Synthetic construct
  source 1..343: mol_type = other DNA
gacatcgtgatgacccagtctccagactccctggctgtgtctctgggcgaaagggccaccatcaactgcaagtccagccagagtgttttatacagctccgacaataaaaactacttagcttggtaccagcagaaaccaggacagcctcctaagctgctcatttactgggcatctacccgggaatccggggtccctgaccgattcagtggcagcgggtctgggacagatttcactctcaccatcagcagcctgcaggctgaagatgtggcagtttattactgtcagcaatattatagtactcttccgtcgacgttcggccaagggaccaaggtggaaatcaaac

SEQ ID NO: 8119 - DNA, 331 bp, synthetic construct
  misc_feature 1..331: note = Synthetic construct
  source 1..331: mol_type = other DNA
aattttatactgactcagccccactctgtgtccgagtctccggggaagacggtcaccatctcctgcacccgcagcagtggcagcattgccagcaactatgtgcagtggtaccagcagcgcccgggcagtgtccccaacaatgtgatctatgaggataaccaaagaccctctggggtccctgatcggttctctggctccatcgacagctcctccaactctgcctccctcaccatctctggactgaagactgaggacgaggctgactactactgtcagtcttacgatagcatctcttgggtgttcggcggagggaccaagctgaccgtcctgg

SEQ ID NO: 8120 - DNA, 325 bp, synthetic construct
  misc_feature 1..325: note = Synthetic construct
  source 1..325: mol_type = other DNA
gaaattgtgttgacgcagtctccaggcaccctgtctttgtctccaggggaaagagccaccctctcctgcagggccagtcagagtgttagcagcagctacttagcctggtaccagcagaaacctggccaggctcccaggctcctcatctatggtgcatccagcagggccactggcatcccagacaggttcagtggcagtgggtctgggacagacttcactctcaccatcagcagactggagcctgaagattttgcagtgtattactgtcagcagtatggtagctcaccgctcactttcggcggagggaccaaggtggagatcaaac

SEQ ID NO: 8121 - DNA, 337 bp, synthetic construct
  misc_feature 1..337: note = Synthetic construct
  source 1..337: mol_type = other DNA
gatgttgtgatgactcagtctccactctccctgcccgtcacccttggacagccggcctccatctcctgcaggtctagtcaaagcctcgtacacagtgatggaaacacctacttgaattggtttcagcagaggccaggccaatctccaaggcgcctaatttataaggtttctaaccgggactctggggtcccagacagattcagcggcagtgggtcaggcactgatttcacactgaaaatcagcagggtggaggctgaggatgttggggtttattactgcatgcaaggtacacactggccccggacgttcggccaagggaccaaggtggaaatcaaac

SEQ ID NO: 8122 - DNA, 154 bp, synthetic construct
  misc_feature 1..154: note = Synthetic construct
  source 1..154: mol_type = other DNA
cctgaccgattctctgcctccaagtctgactcgtcagccaccctggacatagccggactccagactggcgacgaggccgactactactgcggcacatgggatagcagcctgggaggtgtggtcttcggcggagggaccaagctgaccgtcctag

SEQ ID NO: 8123 - DNA, 325 bp, synthetic construct
  misc_feature 1..325: note = Synthetic construct
  source 1..325: mol_type = other DNA
gaaattgtgttgacacagtctccagccaccctgtctttgtctccaggggaaagagccaccctctcctgcagggccagtcagagtgttagcagctacttagcctggtaccaacagaaacctggccaggctcccaggctcctcatctatgatgcatccaacagggccactggcatcccagccaggttcagtggcagtgggtctgggacagacttcactctcaccatcagcagcctagagcctgaagattttgcagtttattactgtcagcagcgtagcaactggcctccgctcactttcggcggagggaccaaggtggagatcaaac

SEQ ID NO: 8124 - DNA, 334 bp, synthetic construct
  misc_feature 1..334: note = Synthetic construct
  source 1..334: mol_type = other DNA
cagcttgtgctgactcaatcgccctctgcctctgcctccctgggagcctcggtcaagctcacctgcactctgagcagtgggcacagcagctacgccatcgcatggcatcagcagcagccagagaagggccctcggtacttgatgaagcttaacagtgatggcagccacagcaagggggacgggatccctgatcgcttctcaggctccagctctggggctgagcgctacctcaccatctccagcctccagtctgaggatgaggctgactattactgtcagacctggggcactggcattcatgtcttcggaactgggaccaaggtcaccgtcctag

SEQ ID NO: 8125 - DNA, 331 bp, synthetic construct
  misc_feature 1..331: note = Synthetic construct
  source 1..331: mol_type = other DNA
cagtctgccctgactcagcctgcctccgtgtctgggtctcctggacagtcgatcaccatctcctgcactggaaccagcagtgacgttggtggttataactatgtctcctggtaccaacaacacccaggcaaagcccccaaactcatgatttatgatgtcagtaatcggccctcaggggtttctaatcgcttctctggctccaagtctggcaacacggcctccctgaccatctctgggctccaggctgaggacgaggctgattattactgcagctcatatacaagcagcagcactcaggtcttcggaactgggaccaaggtcaccgtcctag

SEQ ID NO: 8126 - DNA, 322 bp, synthetic construct
  misc_feature 1..322: note = Synthetic construct
  source 1..322: mol_type = other DNA
gccatccggataacccagtctccatcctcactctctgcatctacaggagacagagtcaccatcacttgtcgggcgagtcagggtattagcagttatttagcctggtatcagcaaaaaccagggaaagcccctaagctcctgatctatgctgcatccactttgcaaagtggggtcccatcaaggttcagcggcagtggatctgggacagatttcactctcaccatcagctgcctgcagtctgaagattttgcaacttattactgtcaacagtattatagttacccattcactttcggccctgggaccaaagtggatatcaaac

SEQ ID NO: 8127 - DNA, 257 bp, synthetic construct
  misc_feature 1..257: note = Synthetic construct
  source 1..257: mol_type = other DNA
cagtctgccctgactcagcctgcctccgtgtctgggtctcctggacagtcgatcaccatctcctgcactggaaccagcagtgacgttggtggttataaggatttctaatcgcttctctggctccaagtctggcaacacggcctccctgatcatctctggcctccaggttgacgacgaggctgattattactgcacctcatatacaaacaacaccaattctcaggtattcggcggagggaccaagctgaccgtcctag

SEQ ID NO: 8128 - DNA, 322 bp, synthetic construct
  misc_feature 1..322: note = Synthetic construct
  source 1..322: mol_type = other DNA
gacatccagatgacccagtctccatcctccctgtctgcatctgtaggagacagagtcaccatcacttgccgggcaagtcagagcattagcagctatttaaattggtatcagcagaaaccagggaaagcccctaagctcctgatctatgctgcatccagtttgcaaagtggggtcccatcaaggttcagtggcagtggatctgggacagatttcactctcaccatcagcagtctgcaacctgaagattttgcaacttactactgtcaacagagttacagtaccccccggacgttcggccaagggaccaaggtggaaatcaaac

SEQ ID NO: 8129 - DNA, 325 bp, synthetic construct
  misc_feature 1..325: note = Synthetic construct
  source 1..325: mol_type = other DNA
gacatccagatgacccagtctccttccaccctgtctgcatctgtaggagacagagtcaccatcacttgccgggccagtcagagtattagtagctggttggcctggtatcagcagaaaccagggaaagcccctaagctcctgatctataaggcatctagtttagaaagtggggtcccatcaaggttcagcggcagtggatctgggacagaattcactctcaccatcagcagcctgcagcctgatgattttgcaacttattactgccaacagtataatagttattccctggggacttttggccaggggaccaagctggagatcaaac

SEQ ID NO: 8130 - DNA, 331 bp, synthetic construct
  misc_feature 1..331: note = Synthetic construct
  source 1..331: mol_type = other DNA
cagtctgccctgactcagcctgcctccgtgtctgggtctcctggacagtcgatcaccatctcctgcactggaaccagcagtgatgttgggacttatgaccttgtctcctggtaccaacagcacccaggcaaagcccccaaactcatgatttatgaagtcaataagcggccctcaggggtttctaatcgcttctctggctccaagtctggcaacacggcctccctgacaatctctgggctccaggctgaggacgaggctgattattactgctgctcatatgcaggtaataatatcccgctattcggcggcgggaccaagctgaccgtcctag

SEQ ID NO: 8131 - DNA, 340 bp, synthetic construct
  misc_feature 1..340: note = Synthetic construct
  source 1..340: mol_type = other DNA
gatgttgtgatgactcagtctccactctccctgcccgtcacccttggacagccggcctccatctcctgcaggtctagtcaaagcctcgtatacagtgatggaaacacctacttgaattggtttcagcagaggccaggccaatctccaaggcgcctaatttataaggtttctaaccgggactctggggtcccagacagattcagcggcagtgggtcaggcactgatttcacactgaaaatcagcagggtggaggctgaggatgttggggtttattactgcatgcaaggtacacactggcctccgctcactttcggcggagggaccaaggtggagatcaaac

SEQ ID NO: 8132 - DNA, 331 bp, synthetic construct
  misc_feature 1..331: note = Synthetic construct
  source 1..331: mol_type = other DNA
cagtctgtgctgacgcagccgccctcagtgtctggggccccagggcagagggtcaccatctcctgcactgggagcagctccaacatcggggcaggttatgatgtacactggtaccagcagcttccaggaacagcccccaaactcctcatctatggtaacagcaatcggccctcaggggtccctgaccgattctctggctccaagtctggcacctcagcctccctggccatcactgggctccaggctgaggatgaggctgattattactgccagtcctatgacagcagcctgagtggagtcttcggaactgggaccaaggtcaccgtcctag

SEQ ID NO: 8133 - DNA, 340 bp, synthetic construct
  misc_feature 1..340: note = Synthetic construct
  source 1..340: mol_type = other DNA
gacatcgtgatgacccagtctccagactccctggctgtgtctctgggcgagagggccaccatcaactgcaagtccagccagagtgttttatacagctccaacaataagaactacttagcttggtaccagcagaaaccaggacagcctcctaagctgctcatttactgggcatctacccgggaatccggggtccctgaccgattcagtggcagcgggtctgggacagatttcactctcaccatcagcagcctgcaggctgaagatgtggcagtttattactgtcagcaatattatagtacttcgtacacttttggccaggggaccaagctggagatcaaac

SEQ ID NO: 8134 - DNA, 331 bp, synthetic construct
  misc_feature 1..331: note = Synthetic construct
  source 1..331: mol_type = other DNA
cagtctgccctgactcagcctgcctccgtgtctgggtctcctggacagtcgatcaccatatcctgcactggaaccagcagtgacgttggtggttataattctgtctcctggtaccaacaacacccaggcaatgcccccaaagtcatgatttatgatgtcattaaccgaccctcaggggtttctagtcgcttctctggctccaagtctggcaacacggcctccctgaccatctctgggctccaggctgaggacgaggctacttattactgcagctcatatacaatccgcagcacccatgtcttcggagctgggaccaaggtcaccgtcctag

SEQ ID NO: 8135 - DNA, 325 bp, synthetic construct
  misc_feature 1..325: note = Synthetic construct
  source 1..325: mol_type = other DNA
gaaattgtgttgacgcagtctccaggcaccctgtctttgtctccaggggaaagagccaccctctcctgcagggccagtcagagtgttcccagcagctatttagcctggtaccagcagaaacctggccaggctcccaggctcctcatctatggtgcatccagcagggccactggcatcccagacaggttcagtggcagtgggtctgggacagacttcactctcaccatcagcagaccggagcctgaagattttgcagtgtattactgtcagcaatatggtagccctccgtggacgttcggccaagggaccaaggtggaaatcaaac

SEQ ID NO: 8136 - DNA, 196 bp, synthetic construct
  misc_feature 1..196: note = Synthetic construct
  source 1..196: mol_type = other DNA
gtccgtgggctttatgatgtcagtaatcggccctcagggatttctaatcgcttctctggctccaagtctggcaacacggcctccctgaccatctctgggctccaggctgacgacgaggctgattattactgcacctcatatacaaacgacagcaattctcaggtattcggcggagggaccaagttgaccgtcctag

SEQ ID NO: 8137 - DNA, 322 bp, synthetic construct
  misc_feature 1..322: note = Synthetic construct
  source 1..322: mol_type = other DNA
gacatccagatgacccagtctccttccaccctgtctgcatctgtaggagacagagtcaccatcacttgccgggccagtcagagaattagtagctgggtggcctggtatcagcagaaaccagggaaagcccctaagctcctgatctataaggcagttagtttagaaggtggtgtcccatcaaggttcagcggcagtggatctgggacagaattcactctcaccatcagccgcctgcagcctgatgatttttcaacttattactgccaacagtatgatagttatccggaaacgttcggccaagggaccaaggtggaaatcaaac

SEQ ID NO: 8138 - DNA, 334 bp, synthetic construct
  misc_feature 1..334: note = Synthetic construct
  source 1..334: mol_type = other DNA
cagcttgtgctgactcaatcgccctctgcctctgcctccctgggagcctcggtcaagctcacctgcactctgagcagtgggcacagcagctacgccatcgcatggcatcagcagcagccagagaagggccctcggtacttgatgaagcttaacagtgatggcagccacagcaagggggacgggatccctgatcgcttctcaggctccagctctggggctgagcgctacctcaccatctccagcctccagtctgaggatgaggctgactattactgtcagacctggggcactggcccttgggtgttcggcggagggaccaagctgaccgtcctag

SEQ ID NO: 8139 - DNA, 322 bp, synthetic construct
  misc_feature 1..322: note = Synthetic construct
  source 1..322: mol_type = other DNA
gaaattgtgttgacacagtctccagccaccctgtctttgtctccaggggaaagagccaccctctcctgcagggccagtcagagtgttagcagctacttagcctggtaccaacaaaaacctggccaggctcccaggctcctcatctatgatgcatccaacagggccactggcatcccagccaggttcagtggcagtgggtctgggacagacttcactctcaccatcagcagcctagagcctgaagattttgcagtttattactgtcagcagcgtagcaactggcctctcactttcggcggagggaccaaggtggagatcaaac

SEQ ID NO: 8140 - DNA, 322 bp, synthetic construct; identical to SEQ ID NO: 1831
  misc_feature 1..322: note = Synthetic construct
  source 1..322: mol_type = other DNA

SEQ ID NO: 8141 - DNA, 325 bp, synthetic construct
  misc_feature 1..325: note = Synthetic construct
  source 1..325: mol_type = other DNA
gaaattgtattgacgcagtctccaggcaccctgtctttgtctccaggggaaagagccaccctctcctgcagggccagtcagagtgttagcagcaactccttagcctggtaccagcagatacctggccaggctcccaggctcctcatctatggtgcatccggcagggccactggcatcccagacaggttcagtggcagtgggtctgggacagacttcactctcaccatcagcagactggagcctgaagattttgcagtgtattactgtcagcagtatcataactcactggacacttttggccaggggaccaagctggagatcaaac

SEQ ID NO: 8142 - DNA, 340 bp, synthetic construct
  misc_feature 1..340: note = Synthetic construct
  source 1..340: mol_type = other DNA
gacatcgtgatgacccagtctccagactccctggctgtgtctctgggcgagagggccaccatcaactgcaagtccagccagagtgttttatacacttccaacaataagaactacttagcttggtaccagcagaaaccacgacagcctcctcagctgctcatttactgggcatctacccgggaatccggggtccctgaccgattcagtggcagcgggtctgggacagatttctctctcaccatcagcagcctgcaggctgaagatgtggcagtttattactgtcagcaatattatactactccgtggacgttcggccaagggaccaaggtggaagtcaaac

SEQ ID NO: 8143 - DNA, 331 bp, synthetic construct
  misc_feature 1..331: note = Synthetic construct
  source 1..331: mol_type = other DNA
gaaattgtgttgacgcagtctccaggcaccctgtctttgtctccaggggaaagagccaccctctcctgcagggccagtcagagtgttagcagcagctacttagcctggtaccagcagaaacctggccaggctcccaggctcctcatctatggtgcatccagcagggccactggcatcccagacaggttcagtggcagtgggtctgggacagacttcactctcaccatcagcagactggagcctgaagattttgcagtgtattactgtcagcagtatggtagctcacctccggcattcactttcggccctgggaccaaagtggatatcaaac

SEQ ID NO: 8144 - DNA, 325 bp, synthetic construct
  misc_feature 1..325: note = Synthetic construct
  source 1..325: mol_type = other DNA
gaaattgtgttgacacagtctccagccaccctgtctttgtctccaggggaaagagccaccctctcctgcagggccagtcagagtgttagcagctacttagcctggtaccaacagaaacctggccaggctcccaggctcctcatctatgatgcatccaacagggccactggcatcccagccaggttcagtggcagtgggtctgggacagacttcactctcaccatcagcagcctagagcctgaagattttgcagtttattactgtcagcagcgtagcaactggcctccgatcaccttcggccaagggacacgactggagattaaac

SEQ ID NO: 8145 - DNA, 331 bp, synthetic construct
  misc_feature 1..331: note = Synthetic construct
  source 1..331: mol_type = other DNA
cagactgtggtgacccaggagccatcgctctcagtgtcccctggagggacagtcacactcacttgtggcttgaggtctggctcagtctctactagtgactaccccagttggtaccagcagaccccaggccagcccccacgctcgctcatctacagcacagacactcgctcttctggggtccctgatcgcttttctggctccatccttgggaacaaagctgccctcaccatcacgggggcccaggcagatgatgaatctgattattactgtgtgctctttgtgggtggtggcatttggctattcggcggagggaccaggctgaccgtcctag

SEQ ID NO: 8146 - DNA, 337 bp, synthetic construct
  misc_feature 1..337: note = Synthetic construct
  source 1..337: mol_type = other DNA
gatattgtgatgactcagtctccactctccctgcccgtcaccctaggccagtcggcctccatctcctgcaggtctagtcaaagcctcgtgtccagtaatgggaacacctacttcacttggtttcaacagaggccaggccaatctccaaggcgcctaatttatgaggtttctaagcgggactctggggtcccagacagattcagcggcagtgggtcaggcactgatttctcactgaagatcagcagggtggaggctgaggatattgggtcttattactgcatgcagggtgcacactggccgtacacttttggccaggggaccaagctggagatcaagc

SEQ ID NO: 8147 - DNA, 331 bp, synthetic construct
  misc_feature 1..331: note = Synthetic construct
  source 1..331: mol_type = other DNA
cagactgtggtgacccaggagccatcgttctcagtgtcccctggagggacagtcacactcacttgtggcttaagctctggctcagtctctactagttacttccccatctggtaccagcagaccccaggccaggctccacgcacgctcatctacaacacaagcactcgctcttctggggtccctgatcgcttctctggctccatccttgggaacaaagctgccctcaccatcacgggggcccaggcagatgatgaatctgattattactgtgtgctttatatgactagtggcattgtgctattcggcggagggaccaagctgaccgtcctag

SEQ ID NO: 8148 - DNA, 319 bp, synthetic construct
  misc_feature 1..319: note = Synthetic construct
  source 1..319: mol_type = other DNA
tcctatgagctgacacagccatcctcagtgtcagtgtctccgggacagacagccaggatcacctgctcaggagatgtactggcaaaaaaatatgctcggtggttccagcagaagccaggccaggcccctgtgctggtgatttataaagacagtgagcggccctcagggatccctgagcgattctccggctccagctcagggaccacagtcaccttgaccatcagcggggcccaggttgaggatgaggctgactattactgttactctgcggctgacaacaatctggtattcggcggagggaccaagctgaccgtcctag

SEQ ID NO: 8149 - DNA, 337 bp, synthetic construct
  misc_feature 1..337: note = Synthetic construct
  source 1..337: mol_type = other DNA
gatattgtgatgactcagtctccactctccctgcccgtcacccctggagagccggcctccatctcctgcaggtctagtcagagcctcctgcatagtaatggatacaactatttggattggtacctgcagaagccagggcagtctccacagctcctgatctatttgggttctaatcgggcctccggggtccctgacaggttcagtggcagtggatcaggcacagattttacactgaaaatcagcagagtggaggctgaggatgttggggtttattactgcatgcaagctctacaaactcctttcactttcggccctgggaccaaagtggatatcaaac

SEQ ID NO: 8150 - DNA, 337 bp, synthetic construct
  misc_feature 1..337: note = Synthetic construct
  source 1..337: mol_type = other DNA
gatattgtgatgactcagtctccactctccctgcccgtcacccctggagagccggcctccatctcctgcaggtctagtcagagcctcctgcatagtaatggatacaactatttggattggtacctgcagaagccagggcagtctccacagctcctgatctatttgggttctaatcgggcctccggggtccctgacaggttcagtggcagtggatcaggcacagattttacactgaaaatcagcagagtggaggctgaggatgttggggtttattactgcatgcaagctctacaaactccttgggcttttggccaggggaccaagctggagatcaaac

SEQ ID NO: 8151 - DNA, 322 bp, synthetic construct
  misc_feature 1..322: note = Synthetic construct
  source 1..322: mol_type = other DNA
gacatccagatgacccagtctccatcctccctgtctgcatctgtaggagacagagtcaccatcacttgccaggcgagtcaggacattagcaactatttaaattggtatcagcagaaaccagggaaagcccctaagctcctgatctacgatgcatccaatttggaaacaggggtcccatcaaggttcagtggaagtggatctgggacagattttactttcaccatcagcagcctgcagcctgaagatattgcaacatattactgtcaacagtatgatgatctccctctcactttcggcggagggaccaaggtggagatcaaac

SEQ ID NO: 8152 - DNA, 322 bp, synthetic construct
  misc_feature 1..322: note = Synthetic construct
  source 1..322: mol_type = other DNA
gacatccagatgacccagtctccatcctccctgtctgcatctgtaggagacagagtcaccatcacttgccaggcgagtcaggacattagcaactatttaaattggtatcagcagaaaccagggaaagcccctaagctcctgatctacgatgcatccaatttggaaacaggggtcccatcaaggttcagtggaagtggatctgggacagattttactttcaccatcagcagcctgcagcctgaagatattgcaacatattactgtcaacagtatgataatatccctctgacgttcggccaagggaccaaggtggaaatcaaac

SEQ ID NO: 8153 - DNA, 322 bp, synthetic construct
  misc_feature 1..322: note = Synthetic construct
  source 1..322: mol_type = other DNA
gacatccagatgacccagtctccatcctccctgtctgcatctataggggacagagtcaccatcacttgccggacaagtcagagcattagtacctatttagattggtatcagcagaaaccagggaaagcccctaaactcctgatttatgctacatccactttgcaaagtggggtcccatcaaggttcagtggcagtggatctgggacagatttcactctcactatcagcagtctgcaacctgaagactttgcaacttactactgtcgacagacttacagtaccccgtacacttttggccaggggaccaagctggagatcaaac

SEQ ID NO: 8154 - DNA, 322 bp, synthetic construct
  misc_feature 1..322: note = Synthetic construct
  source 1..322: mol_type = other DNA
gaaattgtgttgacacagtctccagccaccctgtctttgtctccaggggaaagagccaccctctcctgcagggccagtcagagtgttagcagctacttagtctggtaccaacagaaacctggccaggctcccaggctcctcacctatgatgcatccaacagggccactggcatcccagccaggttcagtggcagtgggtctgggacagacttcactctcagcatcagcagcctagagcctgaagattttgcagtttattactgtcagcagcgtatcaactggccgctcaccttcggcggagggaccaaggtggagatcaaac

SEQ ID NO: 8155 - DNA, 322 bp, synthetic construct
  misc_feature 1..322: note = Synthetic construct
  source 1..322: mol_type = other DNA
gacatccagatgacccagtctccatcctccctgtctgcatctgtaggagacagagtcaccatcacttgccgggcaagtcagagcgttaacaactatttaaattggtatcagcagaaaccagggaaagcccctaaactcctgatctatgctgcatccagtttgcaaagtggggccccatcaaggttcagtggcagtggatctgggacagatttcactctcaccatcagcagtctgcaacctgaagattttacaacttactactgtcaacagagttacagtacccctccaagtttcggcggagggaccaaggtggagatcaaac

SEQ ID NO: 8156 - DNA, 337 bp, synthetic construct
  misc_feature 1..337: note = Synthetic construct
  source 1..337: mol_type = other DNA
gatgttgtgatgactcagtctccactctccctgcccgtcagccttggacagccggcctccatctcctgcaggcccggtcaaagcctcgttcacactgatggctacacctacttaaattggtttcaccagaggccaggccaatctccaaggcgcctcatttatagggtttctaaccgtgacgctggtgtcccagacagattcagcggcagtgagtcaggcactgatttcatactaaaaatcagtagtgtggaggctgaggatcttggcatttattactgcatgcagggcacacactggccttggacgttcggccaagggaccagggtggaaatcaaac

SEQ ID NO: 8157 - DNA, 325 bp, synthetic construct
  misc_feature 1..325: note = Synthetic construct
  source 1..325: mol_type = other DNA
ccctatgttctgactcagccaccctcggtgtcggtggccccaggacagacggccaggattacctgtgggggaaacgacattgaaactagaagtgtgcactggtaccagaagaagtcaggccaggcccctgtgctcgtcgtctatgatgacagcgaccggccctcagggatccctgagcgattctctggctccaactctgggaacacggccaccctgacaatcaccagggtcgaagccggagatgaggccgaatatttctgtcaggtctgggattttaatagtgatcatgcactgttcggcggagggaccaggatgaccgtcctag

SEQ ID NO: 8158 - DNA, 334 bp, synthetic construct
  misc_feature 1..334: note = Synthetic construct
  source 1..334: mol_type = other DNA
aaatttttgctgacccagccgcactctgtgtcggagtctccggggaagacattaaccatctcctgcacccgcagcagtggcagcattgccagcaactatgtgcagtggtaccaacagcgcccgggcagcgcccccgtctctgtgatctatgaggatacacaaagaccctctggggtcccggctcggttctctggctccatcgacagctcctccaattctgcctccctcaccatctctggactgcagactgaggacgagggtgactactattgtcagtcttatgataacaattttgattgggttttcggcggagggaccaaagtgaccgtcctaa

SEQ ID NO: 8159 - DNA, 313 bp, synthetic construct
  misc_feature 1..313: note = Synthetic construct
  source 1..313: mol_type = other DNA
gacatccagatgacccagtctccttcaaccctgtctgcatcgataggagacagagtcagcctcacttgccgggccagtcagactattaatacttggctggcctggtatcagcagaagccagggaaagcccctaagctcctgatctataaggcctctactttggaaagtggggtcccatcaaggttcagtggcgctggatctgggacagaattcactctcaccatcagcaacctgcagccggatgactttgcgatttattactgccaataccccccgaggacgttcggccaagggaccaaggttgaagtcaaac

SEQ ID NO: 8160 - DNA, 325 bp, synthetic construct
  misc_feature 1..325: note = Synthetic construct
  source 1..325: mol_type = other DNA
gaaatagtgatgacgcagtctccaggcaccctgtctgtgtctccaggggacagagtcatcctctcctgcagggccagtgagagtgttagcaaccacttggcctggtaccagcacaaacgtggccaggctccccggctcctcatctatggtgggtcaatcagggccactggcgtcccagccaggttcagtggcagtgggtctgggacagacttcactctcaccatcagtggcctgcagtctgaagattttgcaacgtattattgtcagcactataacattgggcacggccacacttttggtcaggggactgaactggatctcaaac

SEQ ID NO: 8161 - DNA, 340 bp, synthetic construct
  misc_feature 1..340: note = Synthetic construct
  source 1..340: mol_type = other DNA
gacatcgtgatgacccagactccagactccctggctgtgtctctgggcgagagggccaccatcaactgcaagtccagccagaatgttttatacagctccaacaataagaactacttagcttggtaccagcataaaccaggacagtctcctaaactgctcatttactgggcatctacccgggaatccggagtccctgaccgaatcagtggcagcgggtctgggacagatttcactctcaccatcagcagcctgcaggctgaagatgtggcagtttattactgtcagcaatattatagtgccccgtggacgttcggccaagggaccaaggtggaaatcaaac

SEQ ID NO: 8162 - DNA, 328 bp, synthetic construct
  misc_feature 1..328: note = Synthetic construct
  source 1..328: mol_type = other DNA
tcctatgtgctgactcagccaccctcggtgtcagtggccccaggtcagacggccagaattacctgtgagggaaccaacattggaaggaaaagtgtgcactggtaccagcagaagtcaggccaggcccctgtgttggtcgtctatggtgatagcgagcggccctcagggatccctgagcgattctccggctccaaatcaaggaacacggccaccctgatcatcaactgggtcgaggccggggatgaggccgactattcctgtcaggtgtgggacattagtgatgagcatccttatgtcttcggacctgggaccaaggtcaccgtcctac

SEQ ID NO: 8163 - DNA, 322 bp, synthetic construct
  misc_feature 1..322: note = Synthetic construct
  source 1..322: mol_type = other DNA
gacatccagatgacccagtctccatcctccctgtctgcatctgtaggagacagagtcaccatcacttgccgggcaagtcaaagcattagcggctatttaaattggtatcagcagaaacctgggaaagcccctaacctcctgatctatgctgcatccagtcttctaagtgaggtcccatcgaggttcagtggcagtggatctgggacagatttcgctctcaccatcagcagtctgcaacctgaagactttgcaacttactactgtcaacagggttacagtaccccgttcaccttcggccaagggacacgactggagattaagc

SEQ ID NO: 8164 - DNA, 331 bp, synthetic construct
  misc_feature 1..331: note = Synthetic construct
  source 1..331: mol_type = other DNA
aattttatgctgactcagccccactctgtgtcggagtctccggggaagacggtaaccatctcctgcacccgcagcagtggcagcattgccagcagctatgtgcagtggtaccagcaacgcccgggcagtgcccccacaactgtgctctatgagactaaccaaagaccctctggggtccctgatcggttctctggctccatcgacagctcctccaactctgcctcccttcacatctctggactgaagactgaggacgaggctgactactactgtcagtcttattatggcggcaatcaggtgttcggcggaggtaccaaggtgaccgtcctaa

SEQ ID NO: 8165 - DNA, 334 bp, synthetic construct
  misc_feature 1..334: note = Synthetic construct
  source 1..334: mol_type = other DNA
cagcctgtgctgactcagccatcttcccattctgcatcttctggagcatcagtcagactcacctgcatggtgagcagtggcttcagtgttggggacttctggataaggtggtaccaacaaaagccagggaaccctccccggtatctcctgtactaccactcagactctggagttcccagccgcttctctggatccaacgatgcatcagccaatgcagggattctgcgtatccctgggctccagcctgaggatgaggctgactattactgtggtacatggcacagcaactctaagactcgagtgttcggcagtggcaccaaggtgaccgtcctcg

SEQ ID NO: 8166 - DNA, 331 bp, synthetic construct
  misc_feature 1..331: note = Synthetic construct
  source 1..331: mol_type = other DNA
cagtctgtgctgactcagccaccctcagcgtctgggacccccgggcagagggtcaccatctcttgttctggaagcaagtccaacatcggaagtaatactgtaaactggtaccagcaactcccaggaacggcccccaaattcctcatctataggaatgatcagcggccctcaggggtccctgaccgattctctggctccaagtctggcacctcagcctccctggccatcagtgggctccaggccgaggatgaggctgattattcctgtgcagcttgggatgacagcctgaatggtgtagtcttcggcggagggaccaagctgaccgtcctag

SEQ ID NO: 8167 - DNA, 325 bp, synthetic construct
  misc_feature 1..325: note = Synthetic construct
  source 1..325: mol_type = other DNA
gccatccggatgacccagtctccatcctcactctctgcatctacaggagacagagtcaccatcacttgtcgggcgagtcagggtattggcagttatttagcctggtatcagcaaaaaccaggaaaagcccctaaactcctcatccatgcttcatccactttacaaagtggggtcccatcaaggttcagtggcagtggatctgggacaactttcactctctccatcagctgcctgcagtctgaagattttgcaacttattactgtcaacagtattataatttcctccctctcactttcggcggagggaccaaggtggagatcagac

SEQ ID NO: 8168 - DNA, 325 bp, synthetic construct
  misc_feature 1..325: note = Synthetic construct
  source 1..325: mol_type = other DNA
gaaattgtgttgacgcagtctccaggcaccctgtctttgtctccaggggaaagagccaccctctcctgcagggccagtcagagtgttcgcagtagctacttagcctggtaccagcagaaacctggccaggctcccaggctcctcatctatggtgcatccagcagggccactggcatcccagacaggttcagtggcagtgggtctgggacagacttcactctcaccatcagcagactggagcctgaagattttgcagtgtattactgtcagcagtatggtacctcactgttcacttttggccaggggaccaagctggagatcaaac

SEQ ID NO: 8169 - DNA, 334 bp, synthetic construct
  misc_feature 1..334: note = Synthetic construct
  source 1..334: mol_type = other DNA
cagtctgtgttgacgcagccgccctcagtgtctgcggccccaggacagaaggtcaccatctcctgctctggaagcagctccaacattgggaataattatgtatcctggtaccagcagctcccaggaacagcccccaaactcctcatttatgacaataataggcgaccctcagggattcctgaccgattctctggctccaagtctggcacgtcagccaccctgggcatcaccggactccagactggggacgaggccgattatttctgcggaacatgggatagcagcctgagtgcaccttgggtgttcggcggagggaccaagctgaccgtcctac

SEQ ID NO: 8170 - DNA, 322 bp, synthetic construct
  misc_feature 1..322: note = Synthetic construct
  source 1..322: mol_type = other DNA
gacatccagctgacccagtctccatcttccgtgtctgcctctgtgggagacagagtcaccatgacttgtcggacgagtcgtggtattaacgatttgttagcctggtatcagcataaaccggggacagcccctaaactcctgatctatgctgcctccattttacatagtggggtcccgtcaaggttcagcggcagtgggtctgggacagatttcactctcaccatcagcagcctgcagcctgaagattttgcaacttactattgtctgcaggctaacactatgcctctcactttcggcggcgggaccaaggtggagatcaagc

SEQ ID NO: 8171 - DNA, 337 bp, synthetic construct
  misc_feature 1..337: note = Synthetic construct
  source 1..337: mol_type = other DNA
gacatcgtgatgacccagtctccagactccctggctgtgtctctgggcgagagggccaccatcaagtgcaagtccagccagagtgtctcatataacagtaagaattacttagcttggtatcagcagaaaccaggacagcctcctaagctgctcattttctgggcctctacccgggaatccggggtccctgaccgattcagtggcagcgggtctgggacagacttcactctcaccatcagcagtctgcaggctgaagatgtggcagtttatttctgtcaacaatattatactacttctgctctcactttcggcggagggaccaaggtggaggtcaaac

SEQ ID NO: 8172 - DNA, 334 bp, synthetic construct
  misc_feature 1..334: note = Synthetic construct
  source 1..334: mol_type = other DNA
agtttcatgctgactcagtctcactctgtgtcggactctccggggaagacagttaccatctcctgcacccgcaccagtggcagcattgccaacaactatgtgcagtggtaccagcagcgcccgggcagcgcccccaccattttgatctatgaagatacccaaagaccctctggggtacctgatcgcttctttggctccatcgacaagtcctccaactctgcctccctcaccatatctgggctcgagactgacgacgaggctgactacttctgtcagtcttttgatagcacttctcactgggtgttcggcggtgggaccaagctgaccgtcctac

SEQ ID NO: 8173 - DNA, 325 bp, synthetic construct
  misc_feature 1..325: note = Synthetic construct
  source 1..325: mol_type = other DNA
tcctatgtgctgactcaggcagcctcggtgtcagtcgccctaggacagacggccacaattccctgtgggggagacaacattggaactaagagtgtgcattggtatttgcagaagccaggccgggcccctgttttggtcgtctttgatagttatttccggccctccgggatccctgagcgagtctctggctccaactctagggacacggccaccctgaccctcaacagagtcgaggccggggatgaggccgactattattgtcaagtttacgataggaatactgatcaatgggtattcggcgaagggaccaagctgaccgtcctag

SEQ ID NO: 8174 - DNA, 331 bp, synthetic construct
  misc_feature 1..331: note = Synthetic construct
  source 1..331: mol_type = other DNA
cagtctgccctgactcagcctcgctcagtgtccgggtctcctggacagtcagtcaccatctcctgcactggaaccagcagtgatgttggtgcttatgactctgtctcctggtatcaacatcacccaggcagagcccccaaactcatgatttatgatgtcaataagcggccctcaggggtccctgatcgcttctctggctccaagtctggctacacggcctccctgaccatctctgggctccgggctgacgatgaggctgattattactgctgctcatatgcaggcagctacacttatgtcttcggaactcagaccaaggtcaccgtcctga

SEQ ID NO: 8175 - DNA, 325 bp, synthetic construct
  misc_feature 1..325: note = Synthetic construct
  source 1..325: mol_type = other DNA
tcttctgagctgactcaggaccctgctgtgtctgtggccttgggacagacagtcacgatcacatgtcaaggagacagcctcagaagctattatgcaagctggtaccagcagaggccaggacaggcccctgttcttgtcatctatgctaaaaacaaccggccctcagggatcccagaccgattctctggctccagctcaggaaacacagcttccttgaccatcactggggctcaggcggaagatgaggctgactattactgtaactcccgggacagcagtggtaaccatcaggtcttcgcaactgggaccaaggtcaccgtcctag

SEQ ID NO: 8176 - DNA, 322 bp, synthetic construct
  misc_feature 1..322: note = Synthetic construct
  source 1..322: mol_type = other DNA
gacatccagatgacccagtctccttccaccctgtctgcatctgtaggagacagagtcaccatcatttgccgggccagtcagagtattagtagttggttggcctggtatcagcagaaaccagggaaagcccctaaactcctgatctatcaggcatcttatttagaaggtggggtcccatcaaggttcagcggcagtggatctgggacagaattctctctcaccatcagcagactgcagcctgatgatcttgcaacttattactgccaacagtatcatacttcttcggaaaccttcggccccgggaccaaggtggaaatcaaac

SEQ ID NO: 8177 - DNA, 322 bp, synthetic construct
  misc_feature 1..322: note = Synthetic construct
  source 1..322: mol_type = other DNA
gacatccagatgacccagtctccttccaccctgtctgcatctgtaggagacagagtcaccatcatttgccgggccagtcagagtattagtagttggttggcctggtatcagcagaaaccagggaaagcccctaaactcctgatctatcaggcatctaatttagaaggtggggtcccatcaaggttcagcggcagtggatctgggacagaattctctctcaccatcagcagactgcagcctgatgatcttgcaacttattactgccaacagtatcatacttcttcggaaaccttcggccccgggaccaaggtggaaatcaaac

SEQ ID NO: 8178 - DNA, 325 bp, synthetic construct
  misc_feature 1..325: note = Synthetic construct
  source 1..325: mol_type = other DNA
gacatccagatgacccagtctccatccaccctgtctgcttctataggagacagagtcatcatcacttgtcgggccagtcagagtattgatagttggttggcctggtatcagcagaagcccgggaaagcccctaaactcctgatctataagacatctaatttacaaagtggggtcccaccaaggttcagcggcagtggatttgggacagaattcactctcgccatcagcagcctgcagcctgatgattttgcaacttatttctgccaacaatactatactttttcttcgtggacgttcggccaagggaccaaggtggaaatcacac

SEQ ID NO: 8179 - DNA, 319 bp, synthetic construct
  misc_feature 1..319: note = Synthetic construct
  source 1..319: mol_type = other DNA
ggcatccagatgacccagtctccttccaccctgtctgcatctgtaggagacagagtcaccattacctgccgggccagtcagagtattaataactggttggcctggtatcagcagaaaccagggaaagcccctaagctcctgatctctaaggcgtccagtttacagagtggagtcccatcaaggttcagcggcagtggatctgagacagaattcactctcaccatcagcagcctgcagcctgatgattttggaacttattactgccaacagtatgataatttgtggtcgttcggccaagggaccaaggtggagatcaaac

SEQ ID NO: 8180 - DNA, 340 bp, synthetic construct
  misc_feature 1..340: note = Synthetic construct
  source 1..340: mol_type = other DNA
gatgttgtgatgactcagtctccactctccctgcccgtcacccttggacagccggcctccatctcctgcatgtctaatcaaagtctcgtgtacagcgatggaaacacctacttgagttggtttcatcagaggccaggccaatctccgaggcgcctaatttataaggtttctaagcgggactctggggtcccagacagattcagcggcagtgggtccggcactaatttcacactgaagatcagcagggtggaggctgaggatgttggggattattactgcatgcaaggaacacactggcctccgtggacgttcggtcaggggaccaaggtggaagtcaaac

SEQ ID NO: 8181 - DNA, 93 bp, synthetic construct
  misc_feature 1..93: note = Synthetic construct
  source 1..93: mol_type = other DNA
aggctgacgacgaggctgattattactgcacctcatatacaaacaacagcaattctcaggtattcggcggagggaccaagctgaccgtcctag

SEQ ID NO: 8182 - DNA, 325 bp, synthetic construct
  misc_feature 1..325: note = Synthetic construct
  source 1..325: mol_type = other DNA
gacatccagatgacccagtctccttccaccctgtctgcatctgtaggagacagagtcaccatcacttgccgggccagtcagagtattagtaactggttggcctggtatcagcagaaaccagggaaagtccctaagctcctgatctatatggcgtctagtatagaaagtggggtcccatcaaggttcagcggcagtggatctgggacagaattcactctcaccatcaccagcctgcaccctgatgattttgcaacttattactgccaacagtataatacttattcggggtggacgttcggccaagggaccaaggtggaaatcaaac

SEQ ID NO: 8183 - DNA, 322 bp, synthetic construct
  misc_feature 1..322: note = Synthetic construct
  source 1..322: mol_type = other DNA
gacatccagatgacccagtctccatcctccctgtctgcatctgtaggagacacagtcaccatcacttgccgggcaagtcaggacattggggatgatttaggctggtttcagcacaaaccaggcaaagcccctcagcgcctcatctatgaagcctccactttgcaaaggggggtcccatcaagatttagcgccagtgcatctggggaggacttcactctcacaatcaacagcctgcagcctgaagattttgcaacttattactgtctacagtacaaaaattaccctcgcacgttcggccaagggaccaaggtggatctcaatc

SEQ ID NO: 8184 - DNA, 322 bp, synthetic construct
  misc_feature 1..322: note = Synthetic construct
  source 1..322: mol_type = other DNA
tcttatgagctgacacagccaccctcggtgtcagtgtccccaggacagacggccaagatcacctgctctgcagatgtgttgtcaaagcaatatgcttattggtaccagcagaagccaggccaggcccctgtgttggtgatatataaagacaatgagaggccctcacggattcctgaacgattctctggctccagctcagggacaacagccacgttgaccatcattacagtccaggcagaagacgaggctgactattactgtcaatcagcggacagcagtggtacttgggtctttggcggagggaccaagctgaccgtcctag

SEQ ID NO: 8185 - DNA, 334 bp, synthetic construct
  misc_feature 1..334: note = Synthetic construct
  source 1..334: mol_type = other DNA
cagtctgtgctgacgcagccgccctcagtgtctggggccccagggcagagggtcaccctttcctgcactgggagcagttccaatctcgggccaggttatgatgtcaactggtaccagcagcttccaggaacagtccccaaactcctcatttatggtaaccgccatcggccctcaggggtctctgaccgattctctggctccaagtctggcacttcagcctccctggccatcactgggctccagcctcaggatgacggttattattattgtcagtcgcatgacagcagcctgactaatttcatctttggcggagggaccaagctgaccgtcctag

SEQ ID NO: 8186 - DNA, 319 bp, synthetic construct
  misc_feature 1..319: note = Synthetic construct
  source 1..319: mol_type = other DNA
gaaattgtgttgacacagtctccagccaccctgtctttgtctccaggggaaagagccaccctctcctgcagggccagtcagagtgttagctactacttagcctggtaccaacagaaacctggccagggtcccaggctcctcatctatgatgcatccaacagggccactggcatcccagccaggttcagtggcagtgggtctgggacagacttcactctcaccatcagcagcctagagcctgaagattgtgcagtttattactgtcagcagcgtaccgactggtacacttttggccaggggaccaagctggagatcaaac

SEQ ID NO: 8187 - DNA, 322 bp, synthetic construct
  misc_feature 1..322: note = Synthetic construct
  source 1..322: mol_type = other DNA
gacatccagctgacccagtctccatcctccctgtctgcatctgtcggagacagagtcaacatcacttgccggacaagtcagatcattaacagctatttaaattggtatcaggtgacaccaggtaaagcccctaagctcctgatctacactgcatccaatttgcaaagtgcgctcccatcaaggttcagtggcagtggatctgggacagatttcactctcaccatcagcagtctgcaacctgaggattttgcagcctacttttgtcaacagacttacagtatcccattcactttcggccctgggaccacagtcaatatcaaac

SEQ ID NO: 8188 - DNA, 133 bp, synthetic construct
  misc_feature 1..133: note = Synthetic construct
  source 1..133: mol_type = other DNA
aagtctggcaacccggcctccctgaccatctctgggctccaggctgacgacgaggctgattattactgcacctcatatacaaacaacagcaattctcaggtattcggcggagggaccaagctgaccgtcctag

SEQ ID NO: 8189 - DNA, 334 bp, synthetic construct
  misc_feature 1..334: note = Synthetic construct
  source 1..334: mol_type = other DNA
cagtctgccctgactcagcctgcctccgtgtctgggtctcctggacagtcgatcaccatctcctgcactggaaccagcagtgacgttggtggttataactatgtctcctggtaccaacaaaacccaggcaaagcccccaaactcatgatttctgatgtcagtaatcggccctcagggatttctaatcgcttctctggctccaagtctggcaacacggcctccctgaccatctctgggctccaggctgacgacgaggctgattattacttcacctcatatacaaacgacagcaattctcaggtattcggcggagggaccaagctgaccgtcctag

SEQ ID NO: 8190 - DNA, 325 bp, synthetic construct
  misc_feature 1..325: note = Synthetic construct
  source 1..325: mol_type = other DNA
gaaattgtgttgacacagtccccaggcaccctgtctttgtctccaggggaaagagccaccctctcctgcagggccagtcacagtgttagcagctacttagcctggtaccaacagaaacctggccaggctcccaggctcctcatctatgatgcatccatcagggccactggcatcccagccaggttcagtggcagtgggtctgggacagacttcactctcaccatcagcagcctagagcctgaagattttgcagtttattactgtcagcagcgtgtcaactggccgtatctcactttcggcggagggaccaaggtggagatcaaac

SEQ ID NO: 8191 - DNA, 331 bp, synthetic construct
  misc_feature 1..331: note = Synthetic construct
  source 1..331: mol_type = other DNA
cagtctgccctgactcagcctgcctccgtgtctgggtctcctggacagtcgatcaccatctcctgcactggaaccagcagtgacgttggtggttataactttgtctcctggtaccaacagcacccaggcaaagcccccaaactcttcatttatgaggtcactaatcggccctcaggggtttctaatcgcttctctggctccaagtctggcaacacggcctccctgaccatctctgggctccaggctgaggacgaggctgattattactgcagctcatatacaagcagcagcacttttgtcttcggaactgggaccaaggtcaccgtcctag

SEQ ID NO: 8192 - DNA, 322 bp, synthetic construct
  misc_feature 1..322: note = Synthetic construct
  source 1..322: mol_type = other DNA
gacatccagatgacccagtctccgtcctcactgtctgcatctgttggagacagagtcaccatcacttgtcggtcgagtcagggcattagaagttatttagcctggtttcagcagaaaccaggggaagcccctaagtccctgctctatgctgcatccactttgcaaagtggggtcccatcaaggttcagcggcagtggatttgagacagatttcactctcaccataaccagcctgcagcctgaagattttgcaacttattactgccaacaatatgaaagttacccgtacacttttggccaggggaccaggctggagatcaaac

SEQ ID NO: 8193 - DNA, 337 bp, synthetic construct
  misc_feature 1..337: note = Synthetic construct
  source 1..337: mol_type = other DNA
gatattgtgatgacccagactccactctcctcacctgtcacccttggacagccggcctccatctcctgcaggtctagtcaaagcctcgtacacagtgatggaaacacctacttgagttggcttcaggagaggccaggccagcctccaagactcctaatttataagatttctaaccggttctctggggtcccagacagattcagtggcagtggggctgggacagatttcacactgaaaatcagcagggtggaagctgaggatgtcggggtttattactgcatgcaagcttcacaatttcctctcactttcggccctgggaccgtagtggatatcaaac

SEQ ID NO: 8194 - DNA, 325 bp, synthetic construct
  misc_feature 1..325: note = Synthetic construct
  source 1..325: mol_type = other DNA
gaaatagtgatgacgcagtctccagccaccctgtctgtgtctccaggggaaagcgccaccctctcctgcagggccagtcagagtattagcaacatcttagcctggtaccagcataaacctggccaggctcccaggctcctcatctatggtgcatccaccagggccactggtatcccagccaggttcagtggcagtgggtctgggacagagttcactctcaccatcagcagcctgcagtctgaagattttgcagtttattactgtcagcagtatgataagtggcctccgtggacgttcggccaagggaccaaggtggaaatcaaac

SEQ ID NO: 8195 - DNA, 331 bp, synthetic construct
  misc_feature 1..331: note = Synthetic construct
  source 1..331: mol_type = other DNA
cagtctgccctgactcagcctgcctccgtgtctgggtctcctggacagtcgatcaccatctcctgcactggaaccagtagtgacgttggtggttataactatgtctcctggtaccaacaacacccaggcaaagcccccaaactcatgatttatgatgtcagtaatcggccctcaggggtttctaatcgcttctctggctccaagtctggcaacacggcctccctgaccatctctgggctccaggctgaggacgagggtgattattactgcagctcatatacaagcatcagcactgtggtattcggcggagggaccaagctgaccgtcctag

SEQ ID NO: 8196 - DNA, 334 bp, synthetic construct
  misc_feature 1..334: note = Synthetic construct
  source 1..334: mol_type = other DNA
cagtctgccctgactcagcctgcctccgtgtctgggtctcctggacagtcgatcaccatctcctgcactggaaccagcagtgacgttggtggttataactatgtctcctggtaccaacaaaacccaggcaaagtccccaaactcatgatttctgatgtcagtaatcggccctcagggatttctaatcgcttctctggctccaagtctggcaacacggcctccctgaccatctctgggctccaggctgacgacgaggctgattattactgcacctcatatacaaacgacagcaattctcaggtattcggcggagggaccaagctgaccgtcctag

SEQ ID NO: 8197 - DNA, 325 bp, synthetic construct
  misc_feature 1..325: note = Synthetic construct
  source 1..325: mol_type = other DNA
gaaatagtgatgacgcagtctccagccatcctgtctgtgtctccaggggaaagagccaccctctcctgcagggccagtcagagtgttagcagcaacttagcctggtaccagcagaaacctggccaggctcccaggctcctcatctatggtgcatccgccagggccactggtgtcccagccaggttcagtggcagtgggtctgacacagagttcactctcaccatcagcagcctgcagtctgaagattttgcagtttattactgtcaacagtataattattggcctccgtacacttttggccaggggaccaagctggacatcaaac

SEQ ID NO: 8198 - DNA, 337 bp, synthetic construct
  misc_feature 1..337: note = Synthetic construct
  source 1..337: mol_type = other DNA
gatattgtgatgactcagtctccactctccctgcccgtcacccctggagagccggcctccatctcctgcaggtctagtcagagcctcctgcatagtaatggatacaactatttggattggtacatgcagaggccagggcagtctccacagctcctgatctatttgggttctaatcgggcctccggggtccctgacaggttcagtggcagtggatcaggcacagattttacactgaaaatcagcagagtggaggctgaggatgttggggtttattactgcatgcaagctctacaaactccgtacacttttggccaggggaccaagctggagatcaaac

SEQ ID NO: 8199 - DNA, 322 bp, synthetic construct
  misc_feature 1..322: note = Synthetic construct
  source 1..322: mol_type = other DNA
gaaattgtgttgacacagtctccagccaccctgtctttgtctccaggggaaagagccaccctctcctgcagggccagtcagagtgttagcagctacttcgcctggtaccaacagaaacctggccagcctcccaggctcctcatgtctgatgaatccaagagggccactggcgtcccagccaggttcagtggcagtgggtctgggacagacttcactctcaccatcagcagcctagaggctgaagattttgcggtttattattgtcagcagcgtagcagctggcctctcactttcggcggagggaccaaggtggagatcaaac

SEQ ID NO: 8200 - DNA, 331 bp, synthetic construct
  misc_feature 1..331: note = Synthetic construct
  source 1..331: mol_type = other DNA
cagtctgccctgactcagcctgcctccgtgtctgggtctcctggacagtcgatcaccatctcctgcactggaaccagcagtgacgttggtgattatgactttgtctcctggtaccaacaacacccaggcaaagcccccaaactcatgatttatgatgtcaataatcggccctcaggggtttctaatcgcttctctggctccaagtctggcaacacggcctccctgaccatctctgggctccaggctgaggacgaggctgattattactgcaactcatatacaaacagcagcactctggtgttcggcggagggaccaagctgaccgtcctag

SEQ ID NO: 8201 - DNA, 331 bp, synthetic construct
  misc_feature 1..331: note = Synthetic construct
  source 1..331: mol_type = other DNA
cagtctgtgttgacgcagccgccctcagtgtctgcggccccaggacagaaggtcaccatctcctgctctggaagcagctccaacattggtaataattatgtatcctggtaccagcagctcccaggaacagcccccaaactcctcatttatgacaataatgagcgaccctcagggattcctgaccgattctctggctccaagtctggcacgtcagccaccctgggcatcaccggactccagactggggacgaggccgattattactgcggaacatgggatagcagcctgagtgcttatgtcttcggaactgggaccaaggtcaccgtcctag

SEQ ID NO: 8202 - DNA, 325 bp, synthetic construct
  misc_feature 1..325: note = Synthetic construct
  source 1..325: mol_type = other DNA
gacatccagatgacccagtctccatcctccctgtctgcatctgtaggagacagagtcaccatcacttgccgggcaagtcagagcattagcagctatttaaattggtatcagcagaaaccagggaaagcccctaagctcctgatctatgctgcatccagtttgcaaagtggggtcccatcaaggttcagtggcagtggatctgggacagatttcactctcaccatcagcagtctgcaacctgaagattttgcaacttactactgtcaacagagttacagtacccctcggagcaccttcggccaagggacacgactggagattaaac

SEQ ID NO: 8203 - DNA, 319 bp, synthetic construct
  misc_feature 1..319: note = Synthetic construct
  source 1..319: mol_type = other DNA
gaaactgtgttgacacagtctccagccaccctgtctttgtctccaggggaaagagccaccctctcctgcagggccagtcagagtgttagcagctacttagcctggtaccaacagaaacctggccaggctcccaggctcctcatctatgatgcatccaacagggccactggcatcccagccaggttcagtggcagtgggtctgggacagacttcactctcaccatcagcagcctagagcctgaagattttgcagtttattactgtcagcagcgtagcaactggcctcttttcggcggagggaccaaggtggagatcaaac

SEQ ID NO: 8204 - DNA, 334 bp, synthetic construct
  misc_feature 1..334: note = Synthetic construct
  source 1..334: mol_type = other DNA
cagtctgccctgactcagcctgcctccgtgtctgggtctcctggacagtcgatcaccatctcctgcactggaaccagcagtgacgttggtggttataactatgtctcctggtaccaacaaaacccaggcaaagcccccaaactcttgatttatgcgggcagtaagcggccctcaggggtttctaatcgcttctctggctccaagtctggcaacacggcctccctgacaatctctgggctccaggctgacgacgaggctgattattactgcacctcatatacaaacaacagcaattctcaggtattcggcggagggaccaagctgaccgtcctag

SEQ ID NO: 8205 - DNA, 325 bp, synthetic construct
  misc_feature 1..325: note = Synthetic construct
  source 1..325: mol_type = other DNA
tcctatgagctgactcagccaccctcagtgtccgtgtccccaggacagacagccagcatcacctgctctggagataaattgggggataaatatgcttgctggtatcagcagaagccaggccagtcccctgtgctggtcatctatcaagatagcaagcggccctcagggatccctgagcgattctctggctccaactctgggaacacagccactctgaccatcagcgggacccaggctatggatgaggctgactattactgtcaggcgtgggacagcagcactgccccttatgtcttcggaactgggaccaaggtcaccgtcctag

SEQ ID NO: 8206 - DNA, 322 bp, synthetic construct
  misc_feature 1..322: note = Synthetic construct
  source 1..322: mol_type = other DNA
tcttatgagctgacacagccaccctcggtgtcagtgtccccaggacagacggccaagatcacctgctctgcagatgtgttgtcaaagcaatatgcttattggtaccagcagaagccaggccaggcccctgtgttggtgatatataaagacaatgagaggccctcacggattcctgaacgattctctggctccagctcagggacaacagccacgttgaccatcattacagtccaggcagaagacgaggctgactattactgtcaatcagcggacagcagtggtacttgggtctttggcggagggaccaagcggaccgtccgag

SEQ ID NO: 8207 - DNA, 331 bp, synthetic construct
  misc_feature 1..331: note = Synthetic construct
  source 1..331: mol_type = other DNA
cagtctgccctgactcagcctgcctccgtgtctgggtctcctggacagtcgatcaccatctcctgcactggaaccagcagtgacgttggtggttataactatgtctcctggtaccaacaacacccaggcaaagcccccaaactcaggatttatgatgtcagtaatcggccctcaggggtttctaatcgcttctctggctccaagtctggcaacacggcctccctgaccatctctgggctccaggctgaggacgaggctgattattactgcagctcatatacaagcagcagcacttgggtgttcggcggagggaccaagctgaccgtcctag

SEQ ID NO: 8208 - DNA, 322 bp, synthetic construct
  misc_feature 1..322: note = Synthetic construct
  source 1..322: mol_type = other DNA
gacatccagatgacccagtctccatcttccgtgtctgcatctgtaggagacagagtcaccatcacttgtcgggcgagtcagggtattagcagttggttagcctggtatcagcagaaaccagggaaagcccctaagctcctgatctatgctgcatccagtttgcaaagtggggtcccatcaaggttcagcggcagtggatctgggacagatttcactctcaccatcagcagcctgcaacctgaagattttgcaacttactattgtcaacagggtaccagtttccccttcactttcggccctgggaccaaagtggatatcaaac

SEQ ID NO: 8209 - DNA, 325 bp, synthetic construct
  misc_feature 1..325: note = Synthetic construct
  source 1..325: mol_type = other DNA
tcctatgtgctgactcagccaccctcggtgtcagtggccccaggacagacggccagcattacctgtgggggaaacaatgttggaagaaaaagtgtgcactggtaccagcagaagccaggccaggcccctatcctggtcgtctatgatgatagcgaccggccctccgggatccctgagcgattctctggctccaactctgggaacacggccaccctgaccatcagcagggtcgaagccggggatgaggccgactattactgtcagttgtgggatagtcgtagtgatcatgtggtattcggcggagggaccaagttgaccgtcctag

SEQ ID NO: 8210 - DNA, 313 bp, synthetic construct
  misc_feature 1..313: note = Synthetic construct
  source 1..313: mol_type = other DNA
gaaattgtattgacacagtctccagccaccctgtctttgtctccaggggaaagagccaccctctcctgcagggccagtcagagtgttagcagctacttagcctggtaccaacagaaacctggccaggctcccaggctcctcatctatgatgcatccaacagggccactggcatcccagccaggttcagtggcagtgggtctgggacagacttcactctcaccatcagcagcctagagcctgaagattctgcagtttattactgtcagcagcgtgacttcactttcggccctgggaccaaagtggaaatcaaac

SEQ ID NO: 8211 - DNA, 322 bp, synthetic construct
  misc_feature 1..322: note = Synthetic construct
  source 1..322: mol_type = other DNA
gccatccagttgacccagtctccatccttcctgtctgcatccgctggagacagagtcaccatcacttgccgggccagtcagggcattaactcttatttagcctggtatcaacaaaagccagggaaagcccctaagctcctgatatatggtgcatccactttgcaatatggggtcccatcaaggttcagcggcagtggatctgggacagacttcactctcacaatcagcagcctgcagcctgaagattttgcaacttattactgtcaacaggttaatgcttaccccttcagtttcggccctgggaccacagttgatatcaaac

SEQ ID NO: 8212 - DNA, 322 bp, synthetic construct
  misc_feature 1..322: note = Synthetic construct
  source 1..322: mol_type = other DNA
gaaatagtgatgacgcagtctccagtcagcctgtctgtgtctccaggggaaagagccaccctctcctgcagggccagtcagagtgttaggggcagcttagcctggtaccagcacaaacctggccaggttcccaggctcatcttctttggtgaatccatcagggccgctggtgtcccaaccaggttcagtgccagtgggtctgagacggacttcactctcaccatcagcagtgtgcaatctgaagattttgcagattattactgtcaccagtatgataactggcctctcactttcggcggcgggaccaaggtggagatcaaac

SEQ ID NO: 8213 - DNA, 334 bp, synthetic construct
  misc_feature 1..334: note = Synthetic construct
  source 1..334: mol_type = other DNA
aattttatgctgactcagccccactctgtgtcggagtctccggggaagacggtaaccatctcctgcacccgcagcagtggcagcattgccagcaactatgtgcagtggtaccagcagcgcccgggcagtgcccccacgactgtgatctatgaggataaccaaagaccctctggggtccctgatcggttctctggctccatcgacagctcctccaactctgcctccctcaccatctctggactgaggcctgacgacgaggctgactactactgtcagtcttgtgataacaacaatcatggagtcttcggaactgggaccaaggtcaccgtcctag

SEQ ID NO: 8214 - DNA, 322 bp, synthetic construct
  misc_feature 1..322: note = Synthetic construct
  source 1..322: mol_type = other DNA
gccatccggatgacccagtctccatcctcactctctgcatcgacaggagacagtgtcaccatcacttgtcgggcgagtcagggtattagtaattatttagcctggtatcagcagaaaccagggaaggcccctaaactcctcgtctattctgcatccactttgcaaactggggtcccatcaaggttcattggcagtggatctgggacagatttcactctcaccatcacctccctgcagtctgaagattttgcatcctattactgtcagcagtattatgatgaccccctcactttcggcggagggaccaaggtggacatcacac

SEQ ID NO: 8215 - DNA, 331 bp, synthetic construct
  misc_feature 1..331: note = Synthetic construct
  source 1..331: mol_type = other DNA
cagtctgtgttgacgcagccgccctcagtgtctgcggccccaggacagaaggtcaccatctcctgctctggaagcggctccaacattgggaataattatgtatcctggtaccaacaattcccaggcacagcccccaaactcctcatttatgacaatagtaggcgaccctcagggattcctgaccgattctctggttccaagtctggcacgtcagccaccctggacatcaccggactccagactggggacgaggccgattattactgcggaacatgggatagcagcctgagtgctgaggtcttcggcggagggactaagctgaccgtcctaa

SEQ ID NO: 8216 - DNA, 224 bp, synthetic construct
  misc_feature 1..224: note = Synthetic construct
  source 1..224: mol_type = other DNA
acactggtaccagcacaaaccagatcagtctccaaaactgctcatcaagtatgcttcccagtccatttcaggggtcccctcgaggttcagtggcagtggatccgggacagatttcaccctcaccatcaatggcctggaacctgaagatgctgcaacgtattactgccatcagagtagtgccttaattcaaacttttggccaggggaccaagctggagatcaaac

SEQ ID NO: 8217 - DNA, 322 bp, synthetic construct
  misc_feature 1..322: note = Synthetic construct
  source 1..322: mol_type = other DNA
gccgtccggatgacccagtctccttcttccctgtctgcatctacaggagacagagtcacaatcacttgtcgggcgagtcaaggagttagtagttatgtagcctggtatcagcaaaaaccgggagaagtccctaagctcctgatctatgctgcatccactttgcaaagaggggtcccatcaaggttcagtggcagtggatctgggacagaattcactctcaccatcagttgcctgcagtctgaggattttgcaacttactactgtcagcagtattacacttcccctctgactttcggccctgggaccaaagtggatgccaaac

SEQ ID NO: 8218 - DNA, 319 bp, synthetic construct
  misc_feature 1..319: note = Synthetic construct
  source 1..319: mol_type = other DNA
tcatatgcgatgactcagccaccctcagtgtccgtgtccccaggacagacagccagcatcacctgttatggagataaactgggggataaatttgttacctggtatcagcagaagccaggccagtcccctgtgttggtcatgtatcaagatagtaagcggccttcagggatccctgagcgattctctggctccaactctgggaacacagccactctgaccatcagcgggacccaggctatggatgaggctgcctattactgtcaggcgtgggacagcagcactgccgttttcggcggagggaccaagctgaccgtcctaa

SEQ ID NO: 8219 - DNA, 325 bp, synthetic construct
  misc_feature 1..325: note = Synthetic construct
  source 1..325: mol_type = other DNA
gacatccagatgacccagtctccttccaccctgtctgcatctgtaggagacagagtcaccatcacttgccgggccagtcagagtattagtagctggttggcctggtatcagcagaaaccagggaaagcccctaagctcctgatctataaggcgtctagtttagaaagtggggtcccatcaaggttcagcggcagtggatctgggacagaattcactctcaccatcagcagcctgcagcctgatgattttgcaacttattactgccaacagtataatagttattttccttggacgttcggccaagggaccaaggtggaaatcaaac

SEQ ID NO: 8220 - DNA, 322 bp, synthetic construct
  misc_feature 1..322: note = Synthetic construct
  source 1..322: mol_type = other DNA
gacatccagatgacccagtctccatcctccctgtctgcatctgtaggagacagagtcaccatcacttgccgggcaagtcagagcattagcacctatttaaattggtatcagcagaaaccggggaaagcccctaggctcctgatctatgctacattcactttgcacagtggggtcccttccaggttcagtggcagtggatctgggacagatttcactctcaccatcagcagtctgcaacctgaagattttgcaacttactactgtcaacagagttttagtaggcctccaactttcggccctgggaccacagtggatatcaaac

SEQ ID NO: 8221 - DNA, 331 bp, synthetic construct
  misc_feature 1..331: note = Synthetic construct
  source 1..331: mol_type = other DNA
cagtctgccctgactcagcctgcctccgtgtctgggtctcctggacagtcgatctccatctcctgcactggatccagcagtgatgttgggacctatgactttgtctcctggtaccaacagcacccaggcaaagcccccaaactcataattcatgaggtcaataagcggccctctggggtttctaatcgcttctctggctccaagtctggcaacacggcctccctgacaatctctgggctccaggctgaagacgaggctgattattactgctgctcatatgcaggtagtagaacttctttcttcggaactgggaccaaggtcaccgtcctaa

SEQ ID NO: 8222 - DNA, 331 bp, synthetic construct
  misc_feature 1..331: note = Synthetic construct
  source 1..331: mol_type = other DNA
cagtctgccctgactcagcctgcctccgtgtctgggtctcctggacagtcgatctccatctcctgcactggatccagcagtgatgttgggacctatgactttgtctcctggtaccaacagcacccaggcaaagcccccaaactcataattcatgaggtcaataagcggccctctggggtttctaatcgcttctctggctccaagtctggcaacacggcctccctgacaatctctgggctccaggctgaggacgaggttgattattactgctgctcatatgcaggtagtagaacttctttcttcggaactgggaccaaggtcaccgtcctaa

SEQ ID NO: 8223 - DNA, 157 bp, synthetic construct
  misc_feature 1..157: note = Synthetic construct
  source 1..157: mol_type = other DNA
ggggtttctaatcgcttctctggctccaagtctggcaacacggcctccctgacaatctctgggctccaggctgaagacgaggctgattattactgctgctcatatgcaggtagtagaacttctttcttcggaactgggaccaaggtcaccgtcctaa

SEQ ID NO: 8224 - DNA, 322 bp, synthetic construct
  misc_feature 1..322: note = Synthetic construct
  source 1..322: mol_type = other DNA
gaaattgtgttgacacagtctccagccaccctgtctttgtctccaggggaaagagccaccctctcctgcagggccagtcagagtattagcagctacttagcctggtaccaacagaaacctggccaggctcccaggctcctcatctatgatgcatccaacagggccactggcatcccagccaggttcagtggcagtgggtctgggacagacttcactctcaccatcagcagcctagagcctgaagattttgcagtttattactgtcagcagcgtggcaactggccgatcaccttcggccaagggacacgactggagattaaac

SEQ ID NO: 8225 - DNA, 334 bp, synthetic construct
  misc_feature 1..334: note = Synthetic construct
  source 1..334: mol_type = other DNA
cagtctgccctgactcagcctgcctccgtgtctgggtctcctggacagtcgatcaccatctcctgcactggaaccaacagtgatgttgggagttataaccttgtctcctggtaccaaaaccacccaggcaaagcccccaaactcatgatttatgatgtcagtaatcggccctcagggatttctaatcgcttctctggctccaagtctggcaacacggcctccctgacaatctctgggctccaggctgacgacgaggctgattattactgcacctcatatacaaacaacagctattctcaggtattcggcggagggaccaagctgaccgtcctag

SEQ ID NO: 8226 - DNA, 322 bp, synthetic construct
  misc_feature 1..322: note = Synthetic construct
  source 1..322: mol_type = other DNA
gacatccagatgacccagtctccatcctccctgtctgcatctgtaggagacagagtcaccatcacttgccgggcaagtcagagcattagcagctatttaaattggtatcagcagaaaccagggaaagcccctaagctcctgatctatgctgcatccagtttgcaaagtggggtcccatcaaggttcagtggcagtggatctgggacagatttcactctcaccatcagcagtctgcaacctgaagattttgcaacttactactgtcaacagagttacagtgcccctcgtacttttggccaggggaccaagctggagatcaaac

SEQ ID NO: 8227 - DNA, 334 bp, synthetic construct
  misc_feature 1..334: note = Synthetic construct
  source 1..334: mol_type = other DNA
cagtctgtgttgacgcagccgccctcagtgtctgcggccccaggacagaaggtcaccatctcctgctctggaagcagctccaacattgggaataattatgtatcctggtaccagcagctcccaggaacagcccccaaactcctcatttatgacaataataaccgaccctcagggattcctgaccgattctctggctccaagtctggcacgtcagccaccctgggcatcaccggactccagactggggacgaggccgattattactgcggaacatgggataacagcctgagtgctggctatgtcttcggaactgggaccaaggtcaccgtcctag

SEQ ID NO: 8228 - DNA, 337 bp, synthetic construct
  misc_feature 1..337: note = Synthetic construct
  source 1..337: mol_type = other DNA
cagtctgccctgactcagcctgcctccgtgtctgggtctcctggacagtcgatcaccatctcctgcactggaaccaacagtgatgttgggagttataaccttgtctcctggtaccaaaaccacccaggcaaagcccccaaagtcttgatttatgagggcagtaagcggccctcaggggtttctaatcgcttctctggctccaagtctggcacgtcagccaccctgggcatcaccggactccagactggggacgaggccgattattactgcggaacatgggataacagcctgagtgctggctatgtcttcggaactgggaccaaggtcaccgtcctag

SEQ ID NO: 8229 - DNA, 340 bp, synthetic construct
  misc_feature 1..340: note = Synthetic construct
  source 1..340: mol_type = other DNA
gacatcgtgatgacccagtctccagactccctggctgtgtctctgggcgagagggccaccatcaactgcaagtccagccagagtgttttatacagctccaacaataagaactccttagcttggtaccagcagaaaccaggacagcctcctcagctcctcatttactgggcatctacccgggaatccggggtccctgaccgattcagtggcagcgggtctgggacagatttcactctcaccatcagcagcctgcaggctgaagatgtggcagtttattactgtcagcaatattatactactcctctgacgttcggccaagggaccaaggtggaaatcaaac

SEQ ID NO: 8230 - DNA, 331 bp, synthetic construct
  misc_feature 1..331: note = Synthetic construct
  source 1..331: mol_type = other DNA
cagtctgccctgactcagcctgcctccgtgtctgggtctcctggacagtcgatcaccatctcctgcactggaaccagcagtgacgttggtgcttataactatgtctcctggtaccaacagcacccaggcaatgcccccaaactcatgatttatgatgtcagtgatcggccctcaggggtctctaatcgcttctctggctccaagtctggcaacacggcctccctgactatctctgggctccaggctgaggacgaggctgattattactgcatctcatatacaactagcagcacttgggtgttcggcagagggaccaaggtgaccgtcctag

SEQ ID NO: 8231 - DNA, 319 bp, synthetic construct
  misc_feature 1..319: note = Synthetic construct
  source 1..319: mol_type = other DNA
tatgatgagctggctcagccaccctcactgtccgtgtccccaggacggacagccaccatcacctgctctggagataaattgggggctagatttacttgctggtatcaacagaaggcaggccagtcccctgttctggtcatctatcaagattccaagcggccctcagggatccctgagcgattctctggctccaactctggggacacagccactctgaccatcaccgggacccagccgacggatgaggctgtctattactgtcaaacgtgggacagcaccactgcggtgttcggcggagggaccgagctgaccgtcctag

SEQ ID NO: 8232 - DNA, 337 bp, synthetic construct
  misc_feature 1..337: note = Synthetic construct
  source 1..337: mol_type = other DNA
gatgttgtgatgactcagtctcccctctccctgcccgtcacccttggacagccggcctccatctcctgcaggtctaatcaaaacctcgtacacagtgatggaagcacctacttaaattggtatcaacagaggccaggccaatctccaaggcgcctcgtttataaggtttctaatcgggactctggggtcccagacagattcagcggcagtgggtcaggcactgacttcacactggaaatcagcagcgtggaggctgaggatgttggggtttattactgcatgcaaggttcacactggccattcactttcggccctgggaccaaactggatatcaagc

SEQ ID NO: 8233 - DNA, 340 bp, synthetic construct
  misc_feature 1..340: note = Synthetic construct
  source 1..340: mol_type = other DNA
gacatcgtgatgacccagtctccagactccctggctgtgtctctgggcgagagggccaccatcaactgcaagtccagccagagtgttttatacagctccaacaataagaactacttagcttggtaccagcagaaaccaggacagcctcctaagctgctcatttactgggcatctacccgggaatccggggtccctgaccgattcagtggcagcgggtctgggacagatttcactctcaccatcagcagcctgcaggctgaagatgtggcagtttattactgtcagcaatattatagtactctgtacacttttggccaggggaccaagctggagatcaaac

SEQ ID NO: 8234 - DNA, 322 bp, synthetic construct
  misc_feature 1..322: note = Synthetic construct
  source 1..322: mol_type = other DNA
gaaattgtgttgacacagtctccagccaccctgtctttgtctccaggggaaagagccaccctctcctgcagggccagtcagagtgttagcagctacttagcctggtaccaacagaaacctggccaggctcccaggctcctcatctatgatgcatccaacagggccactggcatcccagccaggttcagtggcagtgggtctgggacagacttcactctcaccatcagcagcctagagcctgaagattttgcagtttattactgtcagcagcgtagcaactggccttggacttttggccaggggaccaagctggagatcaaac

SEQ ID NO: 8235 - DNA, 337 bp, synthetic construct
  misc_feature 1..337: note = Synthetic construct
  source 1..337: mol_type = other DNA
gacatcgtgatgacccagtctccagactccctggctgtgtctctgggcgagagggccaccatcacctgcaagtccagccagagtcttttatacacctccaacaataagaactacttagcttggtaccagcagaaacccggacagcctcctgaactgctcatttactgggcatctacccgggaatccggggtccctgaccgattcagtggcagcgggtctgggacagatttcactctcaccatcagcagcctgcaggctgacgatgtggcagtttattactgtcagcaatattatagttctatcaccttcggccaagggacacgactggagattaaac

SEQ ID NO: 8236 - DNA, 325 bp, synthetic construct
  misc_feature 1..325: note = Synthetic construct
  source 1..325: mol_type = other DNA
tcctatgagctgacacagccaccctcggtgtcagtgtccccaggacagacggccaggatcacctgctctggagatgcattgccaaagcaatatgcttattggtaccagcagaagccaggccaggcccctgtgctggtgatatataaagacagtgagaggccctcagggatccctgagcgattctctggctccagctcagggacaacagtcacgttgaccatcagtggagtccaggcagaagacgaggctgactattactgtcaatcagcagacagcagtggtactttcgtggtattcggcggagggaccaagctgaccgtcctag

SEQ ID NO: 8237 - DNA, 340 bp, synthetic construct
  misc_feature 1..340: note = Synthetic construct
  source 1..340: mol_type = other DNA
gacatcgtgatgacccagtctccagactccctggctgtgtctctgggcgagagggccaccatcaactgcaagtccagccagagtgttttatacagctccaacaataagaactacttagcttggtaccagcagaaaccaggacagcctcctaagctgctcatttactgggcatctacccgggaatccggggtccctgaccgattcagtggcagcgggtctgggacagatttcactctcaccatcagcagcctgcaggctgaagatgtggcagtttattactgtcagcaatattatagtactccattcactttcggccctgggaccaaagtggatatcaaac

SEQ ID NO: 8238 - DNA, 322 bp, synthetic construct
  misc_feature 1..322: note = Synthetic construct
  source 1..322: mol_type = other DNA
gaaatagtgatgacgcagtctccagccaccctgtctgtgtctccaggggaaagagccaccctctcctgcagggccagtcagagtgttagcagcaacttagcctggtaccagcagaaacctggccaggctcccaggctcctcatctatggtgcatccaccagggccactggtatcccagccaggttcagtggcagtgggtctgggacagagttcactctcaccatcagcagcctgcagtctgaagattttgcagtttattactgtcagcagtataataactggcccctcactttcggcggagggaccaaggtggagatcaaac

SEQ ID NO: 8239 - DNA, 322 bp, synthetic construct
  misc_feature 1..322: note = Synthetic construct
  source 1..322: mol_type = other DNA
gacatccagatgacccagtctccatcctccctgtctgcatctgtaggagacagagtcaccatcacttgccaggcgagtcaggacattagcaactatttaaattggtatcagcagaaaccagggaaagcccctaagctcctgatctacgatgcatccaatttggaaacaggggtcccatcaaggttcagtggaagtggatctgggacagattttactttcaccatcagcagcctgcagcctgaagatattgcaacatattactgtcaacagtatgataatctccctcaaacttttggccaggggaccaagctggagatcaaac

SEQ ID NO: 8240 - DNA, 322 bp, synthetic construct
  misc_feature 1..322: note = Synthetic construct
  source 1..322: mol_type = other DNA
tcctatgagctgacacagccaccctcggtgtcagtgtccccaggacagacggccaggatcacctgctctggagatgcattgccaaagcaatatgcttattggtaccagcagaagccaggccaggcccctgtgctggtgatatataaagacagtgagaggccctcagggatccctgagcgattctctggctccagctcagggacaacagtcacgttgaccatcagtggagtccaggcagaagacgaggctgactattactgtcaatcagcagacagcagtggtacttatgtcttcggaactgggaccaaggtcaccgtcctag

SEQ ID NO: 8241 - DNA, 325 bp, synthetic construct
  misc_feature 1..325: note = Synthetic construct
  source 1..325: mol_type = other DNA
gacatccagatgacccagtctccatcctccctgtctgcatctgtaggagacagagtcaccatcacttgccaggcgagtcaggacattagcaactatttaaattggtatcagcagaaaccagggaaagcccctaagctcctgatctacgatgcatccaatttggaaacaggggtcccatcaaggttcagtggaagtggatctgggacagattttactttcaccatcagcagcctgcagcctgaagatattgcaacatattactgtcaacagtatgataatctccctccgctcactttcggcggagggaccaaggtggagatcaaac

SEQ ID NO: 8242 - DNA, 322 bp, synthetic construct
  misc_feature 1..322: note = Synthetic construct
  source 1..322: mol_type = other DNA
gacatccagatgacccagtctccatcctccctgtctgcatctgtaggagacagagtcaccatcacttgccaggcgagtcaggacattagcaactatttaaattggtatcagcagaaaccagggaaagcccctaagctcctgatctacgatgcatccaatttggaaacaggggtcccatcaaggttcagtggaagtggatctgggacagattttactttcaccatcagcagcctgcagcctgaagatattgcaacatattactgtcaacagtatgataatctccctctcactttcggccctgggaccaaagtggatatcaaac

SEQ ID NO: 8243 - DNA, 328 bp, synthetic construct
  misc_feature 1..328: note = Synthetic construct
  source 1..328: mol_type = other DNA
gaaattgtgttgacgcagtctccaggcaccctgtctttgtctccaggggatagagccaccctctcctgcagggccagtcagagtgtcagcagtgggttcttagcctggtaccagcagaaacctggccaggctcccaggctcctcatctatgaggcatccagcagggccactggcaccccagacaggttcagtggcagtgggtctgggacagagttcactctcaccatcagcagcctgcagtctgaagattttgcagtttattactgtcagcagtatgataactggcctccgatcaccttcggccaggggacacgactggagattaaaa

SEQ ID NO: 8244 - DNA, 328 bp, synthetic construct
  misc_feature 1..328: note = Synthetic construct
  source 1..328: mol_type = other DNA
cagactgtggtgacccaggagccatcgctctcagtgtcccctggaggggcagtgacgctcacttgtggcttgagctctggctcagtctctacctattattatcccagttggttccggcagaccccaggccaggctccacgcacgctcatctacagcacacaccttcgcacttctggggtccctgatcgcttctctggctccattattgggaacaaagctgccctcaccatcacgggggcccaggcagatgatgactgtgactattactgtgtgctgtatctgggtactgtcgtgctcttcggcggagggacaaagctgaccgtcctag

SEQ ID NO: 8245 - DNA, 319 bp, synthetic construct
  misc_feature 1..319: note = Synthetic construct
  source 1..319: mol_type = other DNA
gacatccagatgacccagtctccctccaccctgtctgcatctgtgggagacacagtcaccatcacctgccgggccagtcagagtattaggagttggttggcctggtatcagcagaaaccaggtaaagcccctaaactcctgatctctaaggcgtctgatttacaacctggggtcccatcaaggttcagcggcagtgggtctgggacagaattcactctcaccatcaccagcctgcagcctgatgattttggtacttatcactgccaacaatatgatactctgtggacgttcggccaggggacgaaggtggaaatcaaac

SEQ ID NO: 8246 - DNA, 322 bp, synthetic construct
  misc_feature 1..322: note = Synthetic construct
  source 1..322: mol_type = other DNA
gacatccagatgacccagtctccatcctccctgtctgcatctgtaggagacagagtcaccatcacttgccgggcgagtcagggcattagcaattatttagcctggtatcagcagaaaccagggaaagttcctaagctcctgatctatgctgcatccactttgcaatcaggggtcccatctcggttcagtggcagtggatctgggacagatttcactctcaccatcagcagcctgcagcctgaagatgttgcaacttattactgtcaaaagtataacagtgccccgtacacttttggccaggggaccaagctggagatcaaac

SEQ ID NO: 8247 - DNA, 328 bp, synthetic construct
  misc_feature 1..328: note = Synthetic construct
  source 1..328: mol_type = other DNA
caggctgtggtgactcaggagccctcactgactgtgtccccaggagggacagtcactctcacctgtggctccagcactggagctgtcactagtggtcattatccctactggttccagcagaagcctggccaagccccccggacactgatttatgatgcaaactacaaatactcctggacacctgcccgcttctcaggctccctccttgggggcaaagctgccctgaccctttcgggtgcgctgcctgaggatgaggctgactattactgcctgctctcctatagtgatactcgggtcttcggagctgggaccaaggtcaccgtcctag

SEQ ID NO: 8248 - DNA, 337 bp, synthetic construct
  misc_feature 1..337: note = Synthetic construct
  source 1..337: mol_type = other DNA
gacatcgtgttgacccagtctccagactccctggctgtgtctctgggcgagagggccaccatcaactgcaagtccagccagagtgttttattcagtttaaataataagaattacttagcttggtaccagcagaaaccaggacagcctcctaaactgctcatttactgggcatctacccgggaatccggggtccctgaccgattcagtggcagcgggtctgggacagacttcactctcaccatcagcagtgtgcaggctgaagatgtggcaatttattactgtcagcaatttcatacttcttggacgttcggcccagggaccaaggtggaaatcagac

SEQ ID NO: 8249 - DNA, 325 bp, synthetic construct
  misc_feature 1..325: note = Synthetic construct
  source 1..325: mol_type = other DNA
tcctatgagctgacacagccaccctcggtgtcagtgtccccaggacagacggccaggatcacctgctctggagatgcattgccaaagcaatatgcttattggtaccagcagaagccaggccaggcccctgtgctggtgatatataaagacagtgagaggccctcagggatccctgagcgattctctggctccagctcagggacaacagtcacgttgaccatcagtggagtccaggcagaagacgaggctgactattactgtcaatcagcagacagcagtggtacttattgggtgttcggcggagggaccaagctgaccgtcctag

SEQ ID NO: 8250 - DNA, 340 bp, synthetic construct
  misc_feature 1..340: note = Synthetic construct
  source 1..340: mol_type = other DNA
gagattgtgatgacccagactccactctccttgtctatcacccctggagagcaggcctccatgtcctgcaggtctagtcagagcctcctgcatagtgatggatacacctatttgtattggtttctgcagaaagccaggccagtctccacgctcctgatctatgaagtttccaaccggttctctggagtgccagataggttcagtggcagcgggtcagggacagatttcacactgaaaatcagccgggtggaggctgaggatgttggagtttattactgcatgcaagatgcacaagatcctccgtacacttttggccaggggaccaagctggagatcaaac

SEQ ID NO: 8251 - DNA, 322 bp, synthetic construct
  misc_feature 1..322: note = Synthetic construct
  source 1..322: mol_type = other DNA
gacatccagatgacccagtctccatcctccctgtctgcatctgtaggagacagagtcaccatcacttgccgggcaagtcagagcattagcagctatttaaattggtatcagcagaaaccagggaaagcccctaagctcctgatctatgctgcatccagtttgcaaagtggggtcccatcgaggttcagtggcagtggatctgggacagatttcactctcaccatcagcagtctgcaacctgaagattttgcaacttactactgtcaacagagttacagtagtcctcggacgttcggccaagggaccaaggtggaaatcaaac

SEQ ID NO: 8252 - DNA, 322 bp, synthetic construct
  misc_feature 1..322: note = Synthetic construct
  source 1..322: mol_type = other DNA
gacatccagatgacccagtctccatcttccgtgtctgcatctgtgggagacagagtcaccatcacttgtcgggcgagtcaggatattagcagctggttagtctggtatcagcagaaaccagggaaagcccctaacctcctgatctatgctgcatccagtttgcaaaatggggtcccatcaaggttcagcggcagtggctctgggacagatttcactctcaccatcagcagcctgcagcctgaagattttgcaacttacttttgtcaacaggccagcagtttcccattcactttcggccctgggaccatagtggatatcaaac

SEQ ID NO: 8253 - DNA, 322 bp, synthetic construct
  misc_feature 1..322: note = Synthetic construct
  source 1..322: mol_type = other DNA
gacatccagatgacccagtctccatcctccctgtctgcatctgtaggagacagagtcaccatcacttgccgggcaagtcagagcattagcagctatttaaattggtatcagcagaaaccagggaaagcccctaagctcctgatctatgctgcatccagtttgcaaagtggggtcccatcaaggttcagtggcagtggatctgggacagatttcactctcaccatcagcagtctgcaacctgaagattttgcaacttactactgtcaacagagttacagtaccccattcactttcggccctgggaccaaagtggatatcaaac

SEQ ID NO: 8254 - DNA, 340 bp, synthetic construct
  misc_feature 1..340: note = Synthetic construct
  source 1..340: mol_type = other DNA
gacatcgtgatgacccagtctccagagtccctggctgtgtctctgggcgagagggccaccatcaactgcaagtccagccagagtgttttattcagctccaacaataagaactacttagcttggtaccagcagaaaccaggacagcctccaaagctgctcatttactggtcatctacccgggaatccggggtccctgaccgattcagtggcagcgggtctgggacagatttcactctcaccatcagcagcctgcaggctgaagatgtggcagtttattactgtcagcagtattctagtactccattcactttcggccctgggacctcagtggatatcaaac

SEQ ID NO: 8255 - DNA, 331 bp, synthetic construct
  misc_feature 1..331: note = Synthetic construct
  source 1..331: mol_type = other DNA
cagtctgccctgactcagcctccctccgcgtccgggtctcctgaacagtcagtcaccatctcctgcactggaaccagcagtgacgttggtaattataattatgtctcctggtaccaacaccacccaggcaaagcccccaaactcatgatttatgaggtcaataagcggccctcaggggtccctgatcgcttctctggctccaagtctggcaacacggcctccctgaccgtctctgggctccaggctgaagatgaggctgattattactgcaactcatatgcaggcagcgacaattgggtgttcggcggagggaccaagctgaccgtcttag

SEQ ID NO: 8256 - DNA, 319 bp, synthetic construct
  misc_feature 1..319: note = Synthetic construct
  source 1..319: mol_type = other DNA
gaaatagtgatgacgcagtctccggccatcctgtctgtgtctccaggggaaacagccaccctctcctgcagggccagtcagagaatagccaacaacttggcctggtaccagcagaaacttggccaggctcccaggctcctcatctatgatgcatccactcggcccactgggatcccagccaagttcaggggcagtgggtctgggacagaattcactctcaccatcgtcagcctccagtctgaagattttgcagtttattactgtcagcagtatcatttctggccttcgttcggccgagggaccaaggtggaaatcaagc

SEQ ID NO: 8257 - DNA, 331 bp, synthetic construct
  misc_feature 1..331: note = Synthetic construct
  source 1..331: mol_type = other DNA
cagtctgtgctgactcagccaccctcagcgtctggtacccccgggcagagggtcaccatctcttgttctggaagcagctccaacatcggaagtaattatgtatactggtaccagcagctcccaggaacggcccccaaactcctcatctataggaataatcagcggccctcaggggtccctgaccgattctctggctccaagtctggcacctcagcctccctggccatcagtgggctccggtccgaggatgaggctgattattactgtgcagcatgggatgacagcctgagtggttgggtgttcggcggagggaccaagctgaccgtcctag

SEQ ID NO: 8258 - DNA, 337 bp, synthetic construct
  misc_feature 1..337: note = Synthetic construct
  source 1..337: mol_type = other DNA
gatattgtgatgactcagtctccactctccctgcccgtcacccctggagagccggcctccatctcctgcaggtctagtcagagcctcctgcatagtaatggatacaactatttggattggtacctgcagaagccagggcagtctccacagctcctgatctatttgggttctaatcgggcctccggggtccctgacaggttcagtggcagtggatcaggcacagattttacactgaaaatcagcagagtggaggctgaggatgttggggtttattactgcatgcaagctctacaaacccagatcaccttcggccaagggacacgactggagattaaac

SEQ ID NO: 8259 - DNA, 328 bp, synthetic construct
  misc_feature 1..328: note = Synthetic construct
  source 1..328: mol_type = other DNA
gaaattgtgttgacgcagtctccaggcaccctgtctttgtctccaggggaaagagccaccctctcctgcagggccagtcagagtgttagcagcagctacttagcctggtaccagcagaaacctggccaggctcccaggctcctcatctatggtgcatccagcagggccactggcatcccagacaggttcagtggcagtgggtctgggacagacttcactctcaccatcagcagactggagcctgaagattttgcagtgtattactgtcagcagtatggtagctcaccgcagatcaccttcggccaagggacacgactggagattaaac

SEQ ID NO: 8260 - DNA, 331 bp, synthetic construct
  misc_feature 1..331: note = Synthetic construct
  source 1..331: mol_type = other DNA
cagtctgccctgactcagcctgcctccgtgtctgggtctcctggacagtcgatcaccatctcctgcactggaacgaacagtgacgttggtggttatgagtatgtcacctggtaccaacagcacccaggcaaagcccccaaagtcatgatttatgaggtcaggaatcggccctcaggagttgctcatcggttctctggctccaagtctggcaacacggcctccctgaccatctctgggctccaggctgaggacgaggctgattattactgcagctcatatgcaagcgacaccagtctggtgttcggcggagggaccaagctgaccgtcctaa

SEQ ID NO: 8261 - DNA, 325 bp, synthetic construct
  misc_feature 1..325: note = Synthetic construct
  source 1..325: mol_type = other DNA
gaaattgtgttgacgcagtctccaggcaccctgtctttgtctccaggggaaagagccaccctctcctgcagggccagtcagagtgttagcagcagctacttagcctggtaccagcagaaacctggccaggctcccaggctcctcatctatggtgcatccagcagggccactggcatcccagacaggttcagtggcagtgggtctgggacagacttcactctcaccatcagcagactggagcctgaagattttgcagtgtattactgtcagcagtatggtagctcactgtggacgttcggccaagggaccaaggtggaaatcaaac

SEQ ID NO: 8262 - DNA, 322 bp, synthetic construct
  misc_feature 1..322: note = Synthetic construct
  source 1..322: mol_type = other DNA
gacatccagatgacccagtctccttccaccctatctgcatctgttggagacagagtcaccatcacctgtcgggccagtcagagtattagtacctggttggcctggtatcagcagaaaccagggaaagcccctaaactcctcatctataaggcgtctactttaaatagtggggtcccgtcgaggttcagcggcagtggatctgggacagacttcaccctcaccatcagcagcctgcagcctgatgattttgcaacttattactgccagcaatttaatctttatcccctcactttcggcggagggaccaacgttgagatgaaac

SEQ ID NO: 8263 - DNA, 325 bp, synthetic construct
  misc_feature 1..325: note = Synthetic construct
  source 1..325: mol_type = other DNA
tcttctgagctgactcaggaccctgctgtgtctgtggccttgggacagacagtcaggatcacatgccaaggagacagcctcagaagctattatacaagctggtaccagcagaagccaggacaggcccctgtacttgtcatctatggtaaaaacaaccggccctcagggatcccagaccgattctctggctccacctcaggaaacacagcttccttgaccatcactggggctcaggcggaagatgaggctgactattactgtaactcccgggacagcagtggtaaccatgtggtattcggcggagggaccaagctgaccgtcctgg

SEQ ID NO: 8264 - DNA, 331 bp, synthetic construct
  misc_feature 1..331: note = Synthetic construct
  source 1..331: mol_type = other DNA
cagtctgtgctgactcagccaccctcagcgtctgggacccccgggcagagggtcaccatctcttgttctggaagcagctccaacatcggaagtaatactgtaaactggtaccagcagctcccaggaacggcccccaaactcctcatctataggaataatcagcggccctcaggggtccctgaccgattctctggctccaagtctggcacctcagcctccctggccatcagtgggctccaggctgaggatgaggctgattattactgtgcagcatgggatgacagcctgaatggtgtggtattcggcggagggaccaagctgaccgtcctag

SEQ ID NO: 8265 - DNA, 334 bp, synthetic construct
  misc_feature 1..334: note = Synthetic construct
  source 1..334: mol_type = other DNA
cagtctgccctgactcagcctgcctccgtgtctgggtctcctggacagtcgataaccatctcctgcactggaaccagcagtgacgttggtgattatgactatgtctcctggtaccaacaacacccaggcaaagcccccaaactcataatttatgatgtcactaatcgaccctcgggggtttctaatcgcttctctggctccaagtctggcaacacggcctccctgaccatctctgggctccaggctgaggacgagggtgactattactgcaactcatacacaagcaccaccactcttgtacttttcggcggcgggaccaagctgaccgtcctaa

SEQ ID NO: 8266 - DNA, 325 bp, synthetic construct
  misc_feature 1..325: note = Synthetic construct
  source 1..325: mol_type = other DNA
gaagttgtgttgacgcagtctccaggcaccctgtctttgtctccaggggaaagagccaccctctcctgcagggccagtcagagtgttagtaacaattacttagcctggtaccagcagaaacctggccagcctcccaggctcctcatctatgctgcttccagcaggaccactggcatcccagacaggttcagtggtggtgggtctgggacagacttcactctcaccatcagcagactggagcctgaagattttgcagtgttttactgtcaccagtatggtgactcaccgtggacgttcggccaagggaccaaggtggaaatcaaac

SEQ ID NO: 8267 - DNA, 322 bp, synthetic construct
  misc_feature 1..322: note = Synthetic construct
  source 1..322: mol_type = other DNA
gacatccagatgacccagtctccatcctcactgtctgcatctgttggagacagagtcaccatcacttgtcgggcgagtcagggcattagcgattatttagcctggtttcagcagaagccagggaaagcccctaagtcactaatttattctacatctcaattgcaaaggggggtcccatcaaggttcagcggctggggatatgggaaaaatttcactctcaccgtcagcagcctgcagcctgaagattttgcaatttattactgtcaacagtataatgcttatccgatcaccttcggccaagggacacgactggatattaagc

SEQ ID NO: 8268 - DNA, 325 bp, synthetic construct
  misc_feature 1..325: note = Synthetic construct
  source 1..325: mol_type = other DNA
tcctatgtgctgactcagccaccctcggtgtcagtggccccaggacagacggccaggattacctgtgggggaaacaacattggaagtcggagtgtccactggtaccagcagaggccaggccaggcccctgtactggtcgtctctgatgatagcgaccggccctcagggatccctgagcgattctctggctccaactctgagaacacggccaccctgaccatcagcagggtcgaagccggggatgaggccgactatttctgtcaggtgtgggatactgcttctgatcattatgtcttcggagctgggaccaaggtcaccgtcctag

SEQ ID NO: 8269 - DNA, 322 bp, synthetic construct
  misc_feature 1..322: note = Synthetic construct
  source 1..322: mol_type = other DNA
gaaacagtgatgacgcagtctccagccaccctgtctgtgtctccaggggatagagcccccctctcctgcagggccagtcagagtgttagtaccaacttagcctggtaccagcagaaacctggccaggctccccggctcctcatctatggtgcatccaccagggccactggtatcccagccaggttcagtggcagtgggtctgggacagaattcactctcaccatcagcagcctgcagtctgaagattttgcagtttattactgtcagcagtataataactggccccggacgttcggccaagggaccaaggtggaagtcaagc

SEQ ID NO: 8270 - DNA, 156 bp, synthetic construct
  misc_feature 1..156: note = Synthetic construct
  source 1..156: mol_type = other DNA
tttctaatcgcttctctggctccaagtctggcaacacggcctccctgaccatctctgggctccaggctgacgacgaggctgattattactgcacctcatatacaaacgacaccaattctcaggtattcggcggagggaccaagctgaccgtcctag

SEQ ID NO: 8271 - DNA, 325 bp, synthetic construct
  misc_feature 1..325: note = Synthetic construct
  source 1..325: mol_type = other DNA
gaaatagtgatgacgcagtctccagccaccctgtctgtgtctgcaggggaaacagccaccctttcctgcagggccagtcagagtgttaggagccacttggcctggtaccagcagaggccaggccagcctcccaggctcctcatctttggtgcatccaccagggccactggtgtcccagccaggttcagtggcagtgggtctgggacagagttcactctcaccatctacagcctccagtctgaagactttgcagtctactactgtcagcagtacaataattggcctccttacacttttggccaggggaccaagttggaggtcaaac

SEQ ID NO: 8272 - DNA, 328 bp, synthetic construct
  misc_feature 1..328: note = Synthetic construct
  source 1..328: mol_type = other DNA
cagtctgccctgactcagcctgcctccgtgtttgggtctcctggacagtcgatcaccatctcctgcactggaaccagcagtgatgtggggacttattcccttgtcacctggtaccaacaactcccagggaaagcccccaaactcttaatttttgacgtcaataagcggccctcaggtgtttctaatcgcttctctggctccaagtccggcaacacggcctccctgacaatctctggactccaggctgaggacgaggctgattattattgctgctcatatgcaggcgctacttatgtcttcggaagtgggacccaggtcatcgtcctag

SEQ ID NO: 8273 - DNA, 328 bp, synthetic construct
  misc_feature 1..328: note = Synthetic construct
  source 1..328: mol_type = other DNA
cagtctgccctgactcagcctgcctccgtgtttgggtctcctggacagtcgatcaccatctcctgcactggaaccaacagtgatgttgggagttataaccttgtctcctggtaccaaaaccacccaggcaaagcccccaaagtcttgatttatgagggcagtaagcggccctcaggggtttctaatcgcttctctggctccaagtccggcaacacggcctccctgacaatctctggactccaggctgaggacgaggctgattattattgctgctcatatgcaggcgctacttatgtcttcggaagtgggacccaggtcatcgtcctag

SEQ ID NO: 8274 - DNA, 340 bp, synthetic construct
  misc_feature 1..340: note = Synthetic construct
  source 1..340: mol_type = other DNA
gacatcgtgatgacccagtctccagactccctggctgtgtctctgggcgagagggccaccatcaactgcaggtccagcctgagtgttttttataagtacaacaataacaactacttagcttggtaccagcagaaaccaggacagcctcctaagctgctgttttactgggcatctacccgggaatccggggtccctgaccgattcactggcagcgggtctgggacagaattcactctcaccataagcagcctgcaggctgaagatgtggcagtttattactgtcagcaatattatactactcccctcactttcggcccggggaccagagtggatatcaaac

SEQ ID NO: 8275 - DNA, 325 bp, synthetic construct
  misc_feature 1..325: note = Synthetic construct
  source 1..325: mol_type = other DNA
tcctctgtcctgactcagccaccctcggtgtcagtggccccggggcagacggccaggattccctgtgacttaaacaatgttgaagttaggagtgtacattggtaccagcacaaggcgcgccaggccccagtactggtcgtctatgatgatagtgtccggccctcagggatccctgagcgattctccggctccctgtcctcggacacggccaccctgaccatcagcaggatcgaggccggggatgaggccgactattattgtcaggtgtgggacagtattagtaatcaggtgattttcggcggtgggaccgagctgaccgtcctag

SEQ ID NO: 8276 - DNA, 325 bp, synthetic construct
  misc_feature 1..325: note = Synthetic construct
  source 1..325: mol_type = other DNA
gaaatagtgatgacgcagtctccagccaccctgtctgtgtctccaggggaaggagccgtactctcctgcagggccagtcacagcattatgaccaacttagcctggtaccagcagaaacctggccaggttcccaggctcctcttctatggtgcatccaccagggccactggcacccccgcccgattcattggcagtgggtctgggacagacttcactctcaccatcagcgacctgcagtctgaagactttggtgtttattactgtcagcagtatcatgcgtggcccccgctcaccttcggcggagggaccaaggtggagatcactc

SEQ ID NO: 8277 - DNA, 328 bp, synthetic construct
  misc_feature 1..328: note = Synthetic construct
  source 1..328: mol_type = other DNA
gaaatagtgatgacgcagtctccagccaccctgtctgtgtctccaggggaaagagtcaccctctcctgcagggccagtcagaatattgtcaatactttagcctggtaccagcagaaacctggccaggctcccaggctcctcatatatgatgcctctaccagggccactggtttcccagccaggttcagtggcagtgggtctgggacagagttcactctcaccatcagcagccttcagtctgaagactttgcagtttattattgtcagcagtacagtaagtggcctccggggttcactttcggccaggggaccaagttggagatcaaac

SEQ ID NO: 8278 - DNA, 328 bp, synthetic construct
  misc_feature 1..328: note = Synthetic construct
  source 1..328: mol_type = other DNA
gaaattgtgttgacacagtctccagtcaccctgtctgtgtctccaggggaaagagccaccctctcctgcagggccagtcagagtgttaacagcgacttagcctggtaccaacagaaacctggccgggctcccaggctcctcatctatgatgcatccaacagggcctcgggcatcccagccaggttcagtggcagtgggtctgggacagacttcagtctcaccatcagcagcctagagcctgaagattgtgcagtttattactgtcaacagcgaagcaactggcctccgagtctcactttcggcggagggaccaaggtggagatcaaac

SEQ ID NO: 8279 - DNA, 319 bp, synthetic construct
  misc_feature 1..319: note = Synthetic construct
  source 1..319: mol_type = other DNA
gaaatagtgatgacgcagtctccagccaccctgtctgtgtctccaggagaaagagccaccctctcctgcagggccagtcagagaatcagtagcaacttagcctggtaccagcagagacctggccaggctcccaggctcctcatctttggtgcatccaccagggccaccggtatcccagccaggttcagtggcagtgggtctgggacagagttcactctcaccatcagcagcctgcagtctgacgattttgcagtttattactgtcagcagtacaatagagggtggacgttcggccaagggaccaaggtggacatcaaac

SEQ ID NO: 8280 - DNA, 322 bp, synthetic construct
  misc_feature 1..322: note = Synthetic construct
  source 1..322: mol_type = other DNA
gacatccagatgacccagtctccatcctccctgtctgcatctgtaggagacagagtcaccatcacttgccgggcaagtcagagcattaacagttatttaaattggtatcagcagaaaccagggaaagcccctaagctcctgatccatactgcatccagtttgcaaagtggggtcccatcaaggttcagtggcagtggatctgggacagatttcactctcaccatcagcagtctgcaacctgaggattttgcaacttactcctgtcaacagagttacaatatacccctcactttcggcggagggaccaaggtggagatcaaac

SEQ ID NO: 8281 - DNA, 331 bp, synthetic construct
  misc_feature 1..331: note = Synthetic construct
  source 1..331: mol_type = other DNA
cagtctgtgttgacgcagccgccctcagtgtctgcgaccccaggacagaaggtcaccatctcctgctctggaagcagctccaacattgggaatcattatgtatcctggttccagcagctcccaagtagagcccccaaactcctcatctatgaaaataataagcgaccctcagggattcctgaccgattctctggctccaagtctggcacgtcagccaccctgcacatcaccggactccagactggggacgaggccgattattactgcggaacatgggatagcagcctgagtgctggactcttcggacctgggaccaaggtcaccgtcctag

SEQ ID NO: 8282 - DNA, 319 bp, synthetic construct; identical to SEQ ID NO: 1830
  misc_feature 1..319: note = Synthetic construct
  source 1..319: mol_type = other DNA

SEQ ID NO: 8283 - DNA, 322 bp, synthetic construct
  misc_feature 1..322: note = Synthetic construct
  source 1..322: mol_type = other DNA
gacatccagatgaaccagtctccatcttcactgtctgcatctgttggagacagcgtcaccatcacttgtcgggcgagtcaggctattgacaattttttagcctggtttcagcagaaacctgggaaagcccctaagtccctgatctatggtgcatccactttgcagagtggggtcccatcaaagttcagcggcagtggctctgggaccgatttcactctcaccatctccggcctgcagcctgatgattctgcaacttattactgccaacagtataatcattaccctttcaccttcggccaagggacacgactggagattaaac

SEQ ID NO: 8284 - DNA, 340 bp, synthetic construct
  misc_feature 1..340: note = Synthetic construct
  source 1..340: mol_type = other DNA
gagatcgtcctgacccagtctccagactccctggctgtgtccctgggcgacagggccaccatcacctgcacctccaatcaaagtgttttgttcgcgtccaacggtcggaatttcatagcctggtaccagcagagaccgaggcgaccgcctactcttctcatctacttggcttctactcgaaaatccggggtccctgagcgattcgctgccggcgggtctgacacaaggttctctctcaccatcgcccctgtccagagtgaagacgtggcgacttattactgtcaccagtattatagtactccgtccacttttggccaggggaccagactggagatcaagc

SEQ ID NO: 8285 - DNA, 322 bp, synthetic construct
  misc_feature 1..322: note = Synthetic construct
  source 1..322: mol_type = other DNA
gacatccagatgacccagtctccttccaccctgtctgcatctgtaggagacagagtcaccatcacttgccgggccagtgagagtattagtgactggctggcctggtatcagcagaaaccagggaaagcccctaagctcctgatctataaggcatctaatttaaaaagtggggtcccatcaaggttcagcggcagtggatctgggacagagttcactctcaccatcagcagcctgcagcctgatgattttgcaacttattactgccaacagtttaatagttacacgtggacgttcggccaagggaccaaggtggaagtcagac

SEQ ID NO: 8286 - DNA, 322 bp, synthetic construct
  misc_feature 1..322: note = Synthetic construct
  source 1..322: mol_type = other DNA
tcctatgagctgactcagccaccctcagtgtccgtgtccccaggacagacagccagcatcacctgtattggagataaattggaggatgaatatgttttctggtatcagcagaagccaggccagtcccctgtcctggtcatctatcaggattctgagcggccctcagggatccctgagcgattctctggctccaactctgggcacacagccactctgaccatcagcgggacccaggctgtggatgaggctgagtattactgtcaggcgtgggacagcagttccctttatgtcttcgggactgggaccaaggtcaccgtcctag

SEQ ID NO: 8287 - DNA, 328 bp, synthetic construct
  misc_feature 1..328: note = Synthetic construct
  source 1..328: mol_type = other DNA
gaagttgtgttgacacagtctccagccaccctgtctttgtctccaggggaaagagccaccctctcctgcagggccagtgagagtgttagtagttacttagcctggtatcaacagaaacctggacaggcgcccaggctcctcatttatgatacttccatcagggccactggcgtctcagacagattcagtggcagggggtctgggacagacttcactctcaccatcagccacgtagagcctgaagattttgcactttattattgtcaacaggggaccgactggcctcacctattcactttcggccctgggaccagagtggagatcagac

SEQ ID NO: 8288 - DNA, 319 bp, synthetic construct
  misc_feature 1..319: note = Synthetic construct
  source 1..319: mol_type = other DNA
caaattgtgttgacacagtctccagccaccctgtctttgtctccaggggaaagagccaccctctcctgcagggccagtcagagtattagcgcctccttagcctggtaccaacagaaacctggccaggctcccaggctcctcatctttgatgctttcaacagggccactggcatcccagccaggttcagtggcagtgggtctgggacagacttcactctcaccatcagtagcctggagcctgaagattttgcagtttattactgtcagcagcatttcagctggatcaccttcggccaagggacacgactggagattaaac

SEQ ID NO: 8289 - DNA, 337 bp, synthetic construct
  misc_feature 1..337: note = Synthetic construct
  source 1..337: mol_type = other DNA
gatgttgacctgactcagtctccgctcgtcctgcccgtcgcccttggtcagccggcctccatctcctgcaaggctagtcggagtctcgttcacagtgatggggccacgtacttcaattggttccttcagaggccaggccaacctccaaggcgtcttttttatagaatttctaatcgggactctggggtccctgacagattaagcggcagtggatcaggcactgattttacattgaaaatcagcagggtggaggctaacgataccggaatgtatttttgtatgcagggcacacactggccgctcactttcggcggggggaccatcctggagatcagac

SEQ ID NO: 8290 - DNA, 322 bp, synthetic construct
  misc_feature 1..322: note = Synthetic construct
  source 1..322: mol_type = other DNA
gacatccagatgacccagtctccatcctccctgtccgcatctgtaggggacaaagtcaccatcacttgccgggcaagtcagagcattagcaactatttaaattggtatcttcagaaaccagggaaagcccctaacctcttaatctatggtgcctccagtttgcaaagtggggtcccattaaggttcagtggcagtgggtctgggacagatttcactctcaccatcagcaatctgcaacctgaagattttgcaacttactactgtcaacagagtttcagaaccccgtacacttttggccaggggaccaaggtagagatcaaac

SEQ ID NO: 8291 - DNA, 331 bp, synthetic construct
  misc_feature 1..331: note = Synthetic construct
  source 1..331: mol_type = other DNA
cagtctgtgttgactcagccaccctcagcgtctgggacccccgggcagagggtctctatttcttgtcatggaagcagctccaacatcggtaacaatcctgttttctggtaccagctcctcccaggaacggcccccagactcctcatgtctagtcatattcagcgaccctcaggggtccctgaccgattctctggctcccagtctggcacctcagcctccctggccatcagtgggctccagtctgaggatgagggtttttatttctgtgccacatgggacgacagcctgactggctatgtcttcgggactgggaccaaggtcaccgtcctag

SEQ ID NO: 8292 - DNA, 331 bp, synthetic construct
  misc_feature 1..331: note = Synthetic construct
  source 1..331: mol_type = other DNA
caggcagggctgactcagccaccctcggtgtccaagggcttgagacagaccgccacactcacctgcactgggaacagcaacaatgttggcaaccaaggagcagcttggctgcagcagcaccagggccaccctcccaagctcctatcctacaggaataataaccggccctcagggatctcagagagattatctgcatccaggtcaggaaacacagcctccctgaccattactggactccagcctgaggacgaggctgactattactgctcagcatgggacagcagcctcagtgcttgggtgttcggcggagggaccaagctgaccgtcctag

SEQ ID NO: 8293 - DNA, 322 bp, synthetic construct
  misc_feature 1..322: note = Synthetic construct
  source 1..322: mol_type = other DNA
gacatccagatgacccagtctccttccaccctgtctgcatctgttggagacagagtcaccatcacttgccgggccagtcagagtatttataactggttggcctggtatcagcagaaaccagggaaagcccctaagctcatgctccataaggcgtcaagtttagagagtggggtcccatcaaggttcagcggcagtggatctgggacagaattcactctcaccatcagcagcctgcagcctgatgattttgcaacttattactgtcaacagtatagtagttatccgttcacgtttggccaggggaccaagttggagagcaaac

SEQ ID NO: 8294 - DNA, 334 bp, synthetic construct
  misc_feature 1..334: note = Synthetic construct
  source 1..334: mol_type = other DNA
cagtctgccctgactcagcctgcctccgtgtctgggtctcctggacagtcgatcaccatctcctgcactggaaccagcagtgacattggtgcctatgactatgtctcctggtaccaacaacagccaggcaaagcccccaaactcctgatttttgccgtcagtgatcggccctcagggatttctgatcgcttctctggctccaggtctggcaacacggcctccctgtccatctctgggctccaggctgttgacgaggctgattactactgctcttcatacataagaggcaccgcttcttttgtcttcggaactgggaccacggtcaccgtcctac

SEQ ID NO: 8295 - DNA, 325 bp, synthetic construct
  misc_feature 1..325: note = Synthetic construct
  source 1..325: mol_type = other DNA
gaaatagtgatgacgcagtctccagccaccctgtcagtgtctccaggggaaagagccaccctctcctgctgggccggtcagagtgttggcagcagcttagcctggtaccatcagaaacctggccaggcgcccaggctcctcatatatggtgcatccactagggccactggtgtcccagccaggatcagtggcagtgggtctgggacagagttcactctcaccatcagcagcctgcagtctgaagattttggagtttattactgtcagcactatagtgactggcctccggtaacttttggccaggggaccaagctggagatcaaac

SEQ ID NO: 8296 - DNA, 334 bp, synthetic construct
  misc_feature 1..334: note = Synthetic construct
  source 1..334: mol_type = other DNA
gacattgtgctgactcagtctccactctccctgcccgtcacccctggagagccggcctccctctcctgcaagtcttcgaagagcctcctgcataatggagacaaccttgtggattggttcctgcagaagccagggcagtctccacagctcgtcatccacttggcttctaatcgggcctccggggtccctgacaggttcagtggcaggggatcaggcacagattttatactgacaatcagtagagtggaggctgaggatgttggggtgtacttctgcatgcaaactctccaagctccgtacacttttggccaggggaccaagctggagatcaaac

SEQ ID NO: 8297 - DNA, 334 bp, synthetic construct
  misc_feature 1..334: note = Synthetic construct
  source 1..334: mol_type = other DNA
cagtctgccctgactcagcctgcctccgtgtctgggtctcctggacagtcgatcaccatctcctgcactggaaccaacagtgatgttgggagttataaccttgtctcctggtaccaaaaccacccaggcaaagcccccaaagtcttgatttatgagggcagtaagcggccctcaggggtttctaatcgcttctctggctccaagtctggcaacacggcctccctgacaatctctgggctccaggctgacgacgaggctgattattactgcacctcatatacaaacaacagcaattctcaggtattcggcggagggaccaagctgaccgtcctag

SEQ ID NO: 8298 - DNA, 322 bp, synthetic construct
  misc_feature 1..322: note = Synthetic construct
  source 1..322: mol_type = other DNA
gacatccagatgacccagtctccatcttccgtgtctgcatctgttggagacaaagtcaccttcacttgtcgggcgagtcagggtattagcaactggttagcctggtatcagcagaaaccagggaaacccccaaaactcctgatctctggtgcaaccaccttgcaaagtggggtcccatcaaggttcagcggcagtggatctgggacagattttactctcaccatcaacagcctgcagcctgaagattttgcaacttactattgtcaacaggctaacagtttcccgatcaccttcggccaagggacacgactggaaattaaac

SEQ ID NO: 8299 - DNA, 331 bp, synthetic construct; identical to SEQ ID NO: 1833
  misc_feature 1..331: note = Synthetic construct
  source 1..331: mol_type = other DNA

SEQ ID NO: 8300 - DNA, 322 bp, synthetic construct
  misc_feature 1..322: note = Synthetic construct
  source 1..322: mol_type = other DNA
gacatccagttgacccagtctccatcctccctgtctgcatctgtaggagacagagtcaccatcacttgccgggcaagtcagggcattagaaataatttaggctggtatcagcagaagccagggaaagcccctaagcgcctgatctatgctgcatccagtttgcaaagtggggtcccatcaaggttcagcggcagtggatctgggacagaattcactctcacaatcagcagcctgcagcctgaagattttgcaagttattactgtctccagcacaatagtttcccgctcactttcggcggagggaccaaggtagagatcaaac

SEQ ID NO: 8301 - DNA, 322 bp, synthetic construct
  misc_feature 1..322: note = Synthetic construct
  source 1..322: mol_type = other DNA
gtcatccggatgacccagtctccatcgtcactctctgcatctacgggagacagagtcaccatcacttgtcgggcgagtcaggatgttgattcttatatagcctggtatcaacaaaaaccaggacaaggccctaacctcctaatacactctgcatccactttgcagaccggagtcccacctagattcaatggcagtggatctgggacagatttcactctcaccatcagctgcctgcagtctgaagaccttggaacctattactgtcaacagtatgaaaatctcccactcactttcggcggcgggaccaaggtggagatcaaac

SEQ ID NO: 8302 - DNA, 334 bp, synthetic construct
  misc_feature 1..334: note = Synthetic construct
  source 1..334: mol_type = other DNA
gatattgtgatgactcagtctccactctccctgcccgtcacccctggagagccggcctccatctcctgcaggtctagtcagagcctcctgcatagtaatggatacaactatttggattggtacctgcagaagccagggcagtctccacagctcctgatctatttgggttctaatcgggcctccggggtccctgacaggttcagtggcagtggatcaggcacagattttacactgaaaatcagcagagtggaggctgaggatgttggggtttattactgcatgcaaggtctacaaactccgactttcggccctgggaccaaagtggatatcaaac

SEQ ID NO: 8303 - DNA, 340 bp, synthetic construct
  misc_feature 1..340: note = Synthetic construct
  source 1..340: mol_type = other DNA
ggcatcgtgatgacccagtctccagactccctgactgtgtctctgggcgagagggccaccatcaactgcaagtccaaccagtctcttttatacagctccagccataagaacttcttagcttggtaccagcagaaaccagggcagcctcctaagatgctcttttactgggcatctacccgggagtccggggtccctgaccgattcagtggcagcgggtctgggacagatttcactctcaccatcagcagcctgcaggctgaagatgtggccgtttattactgtcagcaatattctagtactctttggacattcggccaagggaccaaggtggaaatcagac

SEQ ID NO: 8304 - DNA, 334 bp, synthetic construct
  misc_feature 1..334: note = Synthetic construct
  source 1..334: mol_type = other DNA
cagtctgtcctgactcagcctccctccgcgtccgggtctcctggacagtcagtcaccatctcctgcactggagccagcagtgaccttagtgtctacaactctgtctcctggtaccaacagcgcccaggcgaagcccccaaactcttgatttatgaagtcgttaagcggccctcagggatccctgatcgcttctctggctcccagtctggcaacacggcctccctgaccgtctctgggctccaggctgaggatgaggctcattatttctgcagctcatatgcaaccagcgacaatttaagattgtttggtggagggaccaggctgaccgtcgtag

SEQ ID NO: 8305 - DNA, 337 bp, synthetic construct
  misc_feature 1..337: note = Synthetic construct
  source 1..337: mol_type = other DNA
gacatcgtgttgacccagtctccagactccctggctgtgtctctgggcgagagggccaccatcagttgcaagtccagtcagagtgttttatacacctccaataataagaactatttagcctggtaccagcagaagccaggacagcctcctaggttgctcatttactgggcatctacccgggaatccggggtcccagaccgattcattggcagcgggtctgggacagatttcactctcaccatcagcaccctgcaggctgaagatgtggcggtttatttctgtcagcaatattttattactccgactttcggcggagggacctcggtggagagaaaac

SEQ ID NO: 8306 - DNA, 325 bp, synthetic construct
  misc_feature 1..325: note = Synthetic construct
  source 1..325: mol_type = other DNA
gacatccagatgacccagtctccttccaccctgtctgcctctgtaggagacagagtcagcatcacttgccgggccagtcagggaattggtacttggttggcctggtttcagcagaaaccagggaaagcccctaggctcctgatctataaggcatctactttagaaagtggggtcccatcaagattcagcggcagtggatctgggacagacttcactctcaccatcagcagcctgcagcctgatgattttgcaacttattactgccaagaatataatagttaccctatgtacacttttggccaggggaccaggctggagatcaaac

SEQ ID NO: 8307 - DNA, 322 bp, synthetic construct
  misc_feature 1..322: note = Synthetic construct
  source 1..322: mol_type = other DNA
gacatccagatgacccagtctccttccaccctgtctgcatcggtaggagacagagtctccatcacttgccgggccagtcagagtattaataactgggtggcctggtatcagcagagaccagggaaagcccctaaggtcctgatctctcatgcgtctagtttacaaagtgacgtcccgccaaggttcagcggcagtggatctgggacagaattcactctcaccatcagcagcctgcagcctgatgattttgcaacttattactgccaacagtacagtacttatttcgtcactttcggcggggggaccaaggtggagatcaaac

SEQ ID NO: 8308 - DNA, 322 bp, synthetic construct
  misc_feature 1..322: note = Synthetic construct
  source 1..322: mol_type = other DNA
gacatccagatgacccagtctccatcctccctgtctgcatctgtaggagacagagtcacgatcacttgccgggcaagtcagagcattaggacctatttaaattggtatcagcagaaacctgggaaagcccctaagttcctgatctattctgcatccactttgcaaagtggggtcccatcaaggttcagtggcagtggatctgggacagatttcactctcaccatcagtagtctgcaacctgaagattttgcaacttactactgtcaacagagttacagtcccccgttcacttttggccgggggaccaagttggagatcaaac

SEQ ID NO: 8309 - DNA, 328 bp, synthetic construct
  misc_feature 1..328: note = Synthetic construct
  source 1..328: mol_type = other DNA
acctatgtactgactcagccaccctcagtgtcagtggccccaggaatgacggccaggattacctgtgggggagacaacgttggaactcaaaatgtgcactggtaccagcagaagccaggccaggcccctgtgttggtcgtctatagtgacagtaatcggccctcagggatccctgagcgattctctggctccaactctggaaacacggccaccctgagcatcagtggggtcgaagccggggatgaggccgactacttctgtcaggtgtgggatagtactggtgttcacccttttgtcttcggacctgggacccaggtcaccgtcctag

SEQ ID NO: 8310 - DNA, 331 bp, synthetic construct
  misc_feature 1..331: note = Synthetic construct
  source 1..331: mol_type = other DNA
cagtctgtgttgacacagccgccctcagtgtctgcgtccccaggacagaaggtcaccatctcctgctctggaaccagctccaacattggcaataactatgtgtcctggtatcagcaactccctggaacagcccccacactcctcatttatgacaataataagcgaccctcaggacttcctgaccgattctctggcgccaagtctggcacgtcagccaccctggccatcaccggactccagactggggacgaggccgattactactgcggaacgtgggatgacagcctgaatgctggcgtcttcggacctgggaccaaggtcatcgtccttg

SEQ ID NO: 8311 - DNA, 325 bp, synthetic construct
  misc_feature 1..325: note = Synthetic construct
  source 1..325: mol_type = other DNA
aaaattgtgttgacgcagtctccaggcaccctgtctttgtctccaggggaaagagccaccctctcctgcagggccagtcagctttttagcggcagctatttatcttggttccagcagaaacctggtcaggctcccaggctcctcgtctatggtatctccaacagggccactggcatcccagacaggttcagtgccagtgggtctgggacagacttcactctcaccatcagcagactggaccctgaagattttgcagtgtattactgtcagctgtattttggttcaggattcactttcggccctgggaccaaggtggatatcaaac

SEQ ID NO: 8312 - DNA, 213 bp, synthetic construct
  misc_feature 1..213: note = Synthetic construct
  source 1..213: mol_type = other DNA
acccaggcaaagcccccaaactcatgatttatgatgtcagtaatcggccctcagggatttctaatcgcttctctggctccaagtctggcaacacggcctccctgacaatctctgggctccaggctgacgacgaggctgattattactgcacctcatatacaaacgacagcaattctcaggtattcggcggagggaccaagctgaccgtcctag

SEQ ID NO: 8313 - DNA, 325 bp, synthetic construct
  misc_feature 1..325: note = Synthetic construct
  source 1..325: mol_type = other DNA
gaaattgtgttgacacagtctccaggcaccctgtctttgtctccaggggaaggagccagcctctcctgcagggccagtcagagtgtcactaacgactatttagcctggtaccagcagagacctggccaggctcccaggctcctcatctatagtgcctccaccagggccactggcatcccagacaggttcggtggcagtgggtctgggacagacttcactctcaccatcagcaaactggagcctgaagattttgcagtgtatttctgtcagcagtatggcagatcccctcggacgttcggccaagggaccaaggtggaaatcaaac

SEQ ID NO: 8314 - DNA, 337 bp, synthetic construct; identical to SEQ ID NO: 1829
  misc_feature 1..337: note = Synthetic construct
  source 1..337: mol_type = other DNA

SEQ ID NO: 8315 - DNA, 331 bp, synthetic construct
  misc_feature 1..331: note = Synthetic construct
  source 1..331: mol_type = other DNA
cagtctgccctgactcagcctccctccgcgtccgggtctcctggacagtcagtcaccatctcctgcactggaaccaacagtgacgttggtggttataagtatgtctcctggtaccaacaccacccaggcagggcccccaaattcattatgtatgaggtcagtaaacggccctcaggggtccctgatcgcttctctggctccaagtctggcaacacggcctccctgaccatctctgacctcctggctgaagatgaggctgactactactgcagctcatatgcaggcactaacaattttgtcttcggaagtgggaccaaggtcaccgtcctaa

SEQ ID NO: 8316 - DNA, 325 bp, synthetic construct
  misc_feature 1..325: note = Synthetic construct
  source 1..325: mol_type = other DNA
gagattgtgttgacgcagtcgccaggcaccctgtcggtgactccaggacaaaaagccagcgtctcctgcagggccagtcagactattaactacaactatatagcctggtatcagcagaaagctggccagagtcccaggctcctcatctctgggacttccaatagggccgctggcgttcccgacagattcagtggcagtgggtctggagcagagttcactctcaccatcaccagactggagcctgaagattttgcagtctatttctgtcaacaatatggtaattcacctcagacgttcggccaagggaccaaggtggaaatcaaac

SEQ ID NO: 8317 - DNA, 322 bp, synthetic construct
  misc_feature 1..322: note = Synthetic construct
  source 1..322: mol_type = other DNA
gacatccagatgacccagtctccatcctccctgtcagcatctgtaggcgacagagtcaccatcacttgccgggcgagtcagtccattggcaattttttggcctggtatcagcagaaaccagggacagcccctaaactcctggtctctgctgcgtccactttggggagtggggtcccatccaggtttagtggcagtggttctggggcggattacattctcaccatcaccaccctgcaacctgaggatttcgcttcttattactgtcaccagtattatgcgaccccatacacctttggccaggggaccaggctggagatcaaac

SEQ ID NO: 8318 - DNA, 322 bp, synthetic construct
  misc_feature 1..322: note = Synthetic construct
  source 1..322: mol_type = other DNA
gacatccagatgacccagtctccatcctccctgtctgcatctgtcggagacagaatcaccatcacttgccgggcaagtcagacctttaacggctttttaaattggtttcagcagaaaccggggagcgcccctaaactcctcatctatactgcatccactttgcaaagtggggtcccaacaaggttcagtggcagtggatctgggacagagttcactctcaccatcagcagtctgcaacctgaagattttgcaacttactactgtcaacagagtttcagacccccgctcactttcggcggagggaccagggtggagatgaaac

SEQ ID NO: 8319 - DNA, 325 bp, synthetic construct
  misc_feature 1..325: note = Synthetic construct
  source 1..325: mol_type = other DNA
gaaattgtgttgacacagtctccagccaccctgtctttgtctccaggggacagagccaccctctcctgcagggccagtcagagtgttagcagctacttagcctggtaccaacagaagcctggccaggctcccaggctcctcatctatgatgcatccgacagggccactggcatcccagccaggttcagtggcagtgggtctgggacagacttcactctcaccatcagcagcctagagcctgaagattttgcagtttattactgtcagcagcgtagcagctggcctccgatcaccttcggccaagggacacgactggagattaaac

SEQ ID NO: 8320 - DNA, 325 bp, synthetic construct
  misc_feature 1..325: note = Synthetic construct
  source 1..325: mol_type = other DNA
ccctatgtgctgactcaaccaccctcactgtcagtggccccagggaagacggccaggatttcctgtgggggagacaaacttggccgcagaagtgttcactggtaccagttgaggccaggccaggcccctgtgttggtcatccatgatgatgacgtccggcccccagagatccctgagcgattctctggctccaattctgggaacacggccaccctgaccatcaacagggtcaaagccggggatgaggccgactatttttgtcaggtgtgggatagtagtgttgatcccgtgatattcggcggagggaccaagctcaccgtcctgg

SEQ ID NO: 8321 - DNA, 331 bp, synthetic construct
  misc_feature 1..331: note = Synthetic construct
  source 1..331: mol_type = other DNA
ctatctgtgttgacgcagccgccctcagtgtctgcggccccaggacagaaggtctccatctcctgctctggaagcacctccaacattgggaataattatgtgtcctggtaccagcatgtcccaggagcagcccccaaactcctcatttatgacaacaataagcgaccctcagggattcctgaccgattctctggctccaagtctggcacgtcagccaccctggacatcaccgaaatcctgactggggaccaggccgattattactgcggaacatgggatgctagcgtgagtgttgcggtattcggcggagggaccaagctgaccgtcctcg

SEQ ID NO: 8322 - DNA, 331 bp, synthetic construct
  misc_feature 1..331: note = Synthetic construct
  source 1..331: mol_type = other DNA
cagtctgtgttgacgcagccgccctccgtgtctgcggccccaggacagaatgtcaccatctcctgctctggaagcagctccaatattgggaataattatgtttcctggcaccagcagttcccaggaacagcccccaaaatcctcatttatgacactactaagcgaccctcagggattcctgaccgattctctggcgccaagtcaggcacgtcagccaccttggacatcaccggactccagactggggacgaggccgattattactgcggagcatgggatagcagcctgaatgttgtggtgttcggcggggggaccaagctgaccgtcctag

SEQ ID NO: 8323 - DNA, 340 bp, synthetic construct
  misc_feature 1..340: note = Synthetic construct
  source 1..340: mol_type = other DNA
gacatcgtgatgacccagtctccagactccctggctgtgtctctgggcgagcgggccaccatcaactgcaagtccagccagaatcttttatccagcttcaacagtgaaaactacttagcttggtaccaacagaagccaggacagcccccaaagttgctcatttactgggcatctacccgggaatccggggtccctgaccgaatcagtggcaccgggtctgggacagatttcactctcaccatcagtgatctacaggctgcagatgtggcagtttattactgtcaacaatattataatattccttggacgttcggccaagggaccaagctggaaatcaaaa

SEQ ID NO: 8324 - DNA, 331 bp, synthetic construct
  misc_feature 1..331: note = Synthetic construct
  source 1..331: mol_type = other DNA
cagtctgtcctgactcagccgccctcagcgtctgggacccccgggctgagggtcaccgtctcttgttctggaagcagctccaacatcggaagtaatactgttaactggtaccagcacctcccaggagcgccccccaaactcctcatctataatgataataagaggccctcaggactccctgaccgattctctggctccaagtctggcacctcagcctccctggccatcagtgggctccagtctgaggatgaggctgattattactgtgcagcatgggatggcagcctgaatggttatgtcttcggacctgggaccaaggtcaccgtcctag

SEQ ID NO: 8325 - DNA, 328 bp, synthetic construct
  misc_feature 1..328: note = Synthetic construct
  source 1..328: mol_type = other DNA
gacatccagatgacccagtctccatcctccctgtctgtgtctctaggagaaagagtcaccatcacttgccaggcgagtcaagacataggtaactttttaaattggtatcagcagaaaccagggaaagcccctaaactcctgatctacgatggatccaatttggaaacaggggtcccatcaaggttcagtggacgtggctctgggacactttttacattcaccatcagtagcctgcaggctgaagatattgcaacatattactgtcaacaatatgagaacatccctccggggctcacgttcggcggagggaccacggtggagatcaaac

SEQ ID NO: 8326 - DNA, 334 bp, synthetic construct
  misc_feature 1..334: note = Synthetic construct
  source 1..334: mol_type = other DNA
cagtctgccctgactcagcctccctccgcgtccgggtctcttggacagtcagtcaccatctcctgcagtggagccagtagtgacagtagtgtttataactctgtctcctggtaccaacagcgcccagggaaagccccccaactcatcatttatgaagtctataagcgaccctcagggatccctgatcgcttctctggctcccagtctggcaacacggcctccctgaccgtctctgggctccaggctgaggatgaggctgattatttctgcagctcatatgaaaccagcaacaatttgaggttattcggcggagggaccaagctgaccgtcctag

SEQ ID NO: 8327 - DNA, 325 bp, synthetic construct
  misc_feature 1..325: note = Synthetic construct
  source 1..325: mol_type = other DNA
gaaattgtggtgacgcaatctccaggcaccctgtctttgtctccaggggagagagccaccctctcctgcagggccagtcagagtgtaagcggcaaccacttagcctggtaccagcagaagcctggccaggctcccaggctcctcatctacgctgcatccagcagggccactggcatcccagacaggttcagtggcagtgggtctgggacagacttcactctcaccatcagcagactggagcctgaagattttgcagtctatttctgtcagcagtatggtagctcacctgggacgttcggccaagggaccaaggtggaaatcaaac

SEQ ID NO: 8328 - DNA, 325 bp, synthetic construct
  misc_feature 1..325: note = Synthetic construct
  source 1..325: mol_type = other DNA
gaaactgtgttaacgcagtctccagacaccctgtctttgactccaggggaaagagccaccctctcctgcaggcccagtcagagtattagcgatttctacttagcctggtaccagcagaaacctggccaggctcccaggctcctcatctatggtgcctccagcagggccactggcatccccgacaggttcagtggcagtgggtctgggacagacttcactctcaccatcagcagactggagcctgaagattctgcagtatattactgtcagcagtatggcatctcaccgtacacttttggcccggggaccaaggttgagatcaaac

SEQ ID NO: 8329 - DNA, 325 bp, synthetic construct
  misc_feature 1..325: note = Synthetic construct
  source 1..325: mol_type = other DNA
tcctatgtgctgactcaggcaccctcggtgtcagtggccccaggacagacggccaggattacctgtgggggaaacaacattggaagtaaaagtgtgaactggtaccagcagaagccaggccaggcccctgcgctggtcgtctatgatgatagcgaccggccctcagggatccctgagcgattctctggctccaactctgggaacacggccaccctgaccatcaccagggtcgaagccggggatgaggccgactattcctgtcaggtgtgggatagtagtagtgatcattatgtcttcggaactgggaccaaggtcaccgtcctag

SEQ ID NO: 8330 - DNA, 340 bp, synthetic construct
  misc_feature 1..340: note = Synthetic construct
  source 1..340: mol_type = other DNA
gagattgtggtgacccagactccactctccttgtctatcacccctggagagcaggcctccatgtcctgcaggtctagtcagagcctcctgcatagtgatggatacacctatttgtattggtttctgcagaaagccaggccagtctccacgctcctgatctatgaagtttccaaccggttctctggggtgccagataggttcagtggcagcgggtcagggacagatttcacactgaaaatcagccgggtggaggctgaggatgttggagtttattactgcatgcaagatgcacaagatcccttgttcactttcggccctgggaccaaagtggatatcaaac

SEQ ID NO: 8331 - DNA, 325 bp, synthetic construct
  misc_feature 1..325: note = Synthetic construct
  source 1..325: mol_type = other DNA
gaaattgtgttgacgcagtctccaggcaccctgtctttgtctccaggggaaagagccaccctctcctgcagggccagtcagagtgttagcagcagctacttagcctggtaccagcagaaacctggccaggctcccaggctcctcatctatgatgcatccagcagggccactggcatcccagacaggttcagtggcagtgggtctgggacagacttcactctcaccatcagcaggctggagcctgaagattttgcagtgtattactgtcagcagtctggtagctcaccgtacacttttggccaggggaccaagctggagatcaaac

SEQ ID NO: 8332 - DNA, 340 bp, synthetic construct
  misc_feature 1..340: note = Synthetic construct
  source 1..340: mol_type = other DNA
gacatcgttgtgacccagtctccagcctccctggctgtgtctctgggcgagagggccaccatcaactgcaagtccactgaaagtcttttatacagttcaaccaatcgtgactacttggcttggtaccagcacaaaccggggcagcctcctaaactgctcctttacggggcatcgaccccggcatccggagtccctggccgattcaacggcagcggctccgggacagatttcactctcaccatcaccagtctgcaggctgaagatgtgggcgtctattactgtcaacaatattttcgtactcctccgactttcggccaagggaccaaggtggaaatgaaac

SEQ ID NO: 8333 - DNA, 319 bp, synthetic construct
  misc_feature 1..319: note = Synthetic construct
  source 1..319: mol_type = other DNA
gacatccagatgacccagtctccatcctccctgtctgcatctgttggagacagagtcaccatcacttgccgggcaagtcagaccattaataactatttgaattggtatcagcagaaaccagggaaagcccctaaactcctgatctatggtgttaccactttgcagagtggggtcccatcaaggttcagtggcagtgggtctggggcagatttcactctcaccatcagcagtctgcaacctgaagattttgcgacttactactgtcaacagagttacacttccctcactttcggcggagggaccacggtggaaatcaaac

SEQ ID NO: 8334 - DNA, 322 bp, synthetic construct
  misc_feature 1..322: note = Synthetic construct
  source 1..322: mol_type = other DNA
gccatccagttgacccagtctccattctccctgtctgcatctgttggagacagagtcaccatcgcttgccgggccagtcagggcattagcgattacttagcctggtatcagcagaaaccagggaaagcccctaaactcctgatctatgctgcatccactttgcaacgtggggtcccatcaaggttcagcgccagtggatctgggacagatttcactctctccatcagcagcctgcagcctgaagattttgcaacttattactgtcaacaggttgatgctgacccgatcaccttcggccaagggacacgactggagattaaac

SEQ ID NO: 8335 - DNA, 331 bp, synthetic construct
  misc_feature 1..331: note = Synthetic construct
  source 1..331: mol_type = other DNA
cagtctgtcttgactcagccaccctcagtgtctgggacccccgggcagagggtcaccatgtcttgttctggaagcagctcaaacatcggaagaaaccctgtaaactggtatcagcaagtcccaggatcggcccccaaagtcctcatgtatagggattctcaacggcccacaggggtccccgaccgattcctcggctccaactctggcacctcagcctccctggccatcagtgacctccagactgacgatgaggctgattattactgtgcagtttgggatgacaacctgagggcttgggtgttcggcggatggaccaagttgaccgtcctag

SEQ ID NO: 8336 - DNA, 331 bp, synthetic construct
  misc_feature 1..331: note = Synthetic construct
  source 1..331: mol_type = other DNA
cagtctgtggtgacggagccgccctcagtgtctgcggccccaggacagaaggtcaccatctcctgctctggaagcagctccaacattgggatttatcctgtatcctggtaccagcagctcccaggaacagcccccaaactcctcatttttgacaatgataaacgaccctcagggattcctgaccgattctctggctccaagtctggcacgtcagccaccctggacatcaccggactccagactggggacgaggccgactattactgcggaacatgggatagcagtttgagtggtggggtgttcggcggagggaccaagctgaccgtcctag

SEQ ID NO: 8337 - DNA, 334 bp, synthetic construct
  misc_feature 1..334: note = Synthetic construct
  source 1..334: mol_type = other DNA
cagtctgccctgactcagcctgcctccgtgtctgggtctcctggacagtcgatcaccatctcctgcattggaaccggcagtgacgttggtggttatgactatgtctcttggtaccaacaacacccaggcaaagcccccaaactcataatttacgatgtcagtaatcggccctcaggagtctctcatcgcttctctggctccaagtctggctacacggcctccctgatcatctcggggctccaggctgaggacgaggctgattatttctgcgcctcatataccgttagtagtagtctcgaggtcttcgggacagggaccaaggtcaccgtcctag

SEQ ID NO: 8338 - DNA, 322 bp, synthetic construct
  misc_feature 1..322: note = Synthetic construct
  source 1..322: mol_type = other DNA
gacatcgagatgacccagtctccatcttccatgtctgcatctgtaggagacagcgtcaccatcacttgtcgggcgagccagggccttagtggtgaattagcctggtatcggcagagaccaggggaagcccccaaactcctgatttatgatgcatcaaggttggaaagtggagtcccgtcaacgttcagcggcggtggatctgggacagttttcattctcttcatcagcagtatgcagcctgaagattttggaacttactattgtcaacaagcaaacagtttccctcacacgttcggccaagggaccaaggtggaaatgaaac

SEQ ID NO: 8339 - DNA, 331 bp, synthetic construct
  misc_feature 1..331: note = Synthetic construct
  source 1..331: mol_type = other DNA
cagtctgtggtgactcagccaccctcagcgtctgggacccccgggcagagggtcaccttctcttgttctggaagcagctccaacatcggacgaaattatgtatactggtatcagcagctcccaggaacggcccccaaactcctcgtctataggaatgatcagcggctctcaggggtccctgaccgattctctggctccaagtctggcacctcagcctccctggccatcagtgggctccggtccgaggatgaggctgattattactgtgcagcatgggatgacagcctgagtggtccggtattcggcggagggaccaagctgaccgtcctag

SEQ ID NO: 8340 - DNA, 337 bp, synthetic construct
  misc_feature 1..337: note = Synthetic construct
  source 1..337: mol_type = other DNA
gatattgtgatgacccaggctccactctctctgtccgtcacccctggacaggcggcctccatctcctgcaagtccagtcagagcctcctccatagtaatggaaagacctatttatattggtacgtgcagaagccaggccagtcaccacagctcctgatctacgaggtttccaatcggttctctggagtgccagataggttcagtggcagcgggtcagggacagatttcacactgaaaatcagccgggcggaggctgaggatgtcgggatctattactgcatgcaaaataaacaggtttccataaccttcggccaagggacacgactggagattaaac

SEQ ID NO: 8341 - DNA, 331 bp, synthetic construct
  misc_feature 1..331: note = Synthetic construct
  source 1..331: mol_type = other DNA
cagtctgtgttgacgcagtcgccctcagtgtctgcggccccaggacagaaggtcaccatctcctgctctggaggcagctccaacattgggcataattatgtatcctggtaccagcagatcccaggaacagcccccaaactcctcatctatgaaaataataagcgaccctcagggattcctgaccgattctctggctccaagtctggcacgtcagccaccctgggcatcaccggactccagactggggacgaggccgcttattactgcggaacatgggataacagcctgagtgcttgggtgttcggcggagggaccaaactgaccgtcctag

SEQ ID NO: 8342 - DNA, 331 bp, synthetic construct
  misc_feature 1..331: note = Synthetic construct
  source 1..331: mol_type = other DNA
cagtctgtgctgactcagccaccctcagcgtctgggacccccgggcagagggtcaccatctcttgttctggaaggagctccaacatcggaagtaatactataaactggtaccagcagctcccaggaacggcccccaaactcctcatctatactaataatcaggggccctcaggggtccctgaccgattctctggctccaagtctggcacctcagcctccctggccatcagtgggctccagtctgaggatgaggctgattattactgtgcagcatgggatgacagcctgaatggttatgtcttcggaactgggaccaaggtcaccgtcctag

SEQ ID NO: 8343 - DNA, 325 bp, synthetic construct
  misc_feature 1..325: note = Synthetic construct
  source 1..325: mol_type = other DNA
gaaactgtgttgacgcagtctccaggcaccctgtctttgtctccaggggaaagagccgccctctcctgcagggccagtcagagtgttagcagcgaccacttagcctggtaccagcacaaacctggccaggctcccaggctcctcatctatggtgcatccagcagggccactggcatcccagacaggttcagtggaagtgggtctgggacagacttcactctaatcatcaccacagtagagcccgaagattttgccgtgtattattgtcaccagtatgataagtctccctacactttcggccctgggaccaaactggaaatcagcc

SEQ ID NO: 8344 - DNA, 325 bp, synthetic construct
  misc_feature 1..325: note = Synthetic construct
  source 1..325: mol_type = other DNA
gaaacgacactcacgcagtccccagcattcatgtcagcgactccaggagacaaagtcaacatctcctgcaaagccacccaagacattgatgatgatgtgaactggtacctacagaaaccaggagaagctactcttttcattactcaagaagttactactctcgttcctggaatcccacctcgattcagtggcagcgggtctggaacagattttaccctcacaattgataacatagaatctgaggattctccttattacttctgcctacaacatgataatttccctctcggctcttttggccaggggaccaagctggagatcaaac

SEQ ID NO: 8345 - DNA, 325 bp, synthetic construct
  misc_feature 1..325: note = Synthetic construct
  source 1..325: mol_type = other DNA
gacatccagatgacccagtctccctcctccctgtctgcatctgtaggagacagagtcaccatcacttgccgggcaagtcagagcattagcagctatttaaattggtttcagcagaaaccagggaaagcccctaagctcctgatctatgctgcatccagtttgcaaagtggggtcccatcaaggttcagtggcagtggatctgggacatatttcactctcaccatcaacagtctgcaacctgaagattttgcagcttactactgtcaacagagtcacagttcctctccgtggacgttcggccaagggaccaaggtggaaatcaaac

SEQ ID NO: 8346 - DNA, 337 bp, synthetic construct
  misc_feature 1..337: note = Synthetic construct
  source 1..337: mol_type = other DNA
gatattgtgatgactcagtctccactctccctgcccgtcacccctggagagccggcctccatctcctgcaggtctagtcagagcctcctgcatagtaatggatacaactatttggattggtacctgcagaagccagggcagtctccacagctcctgatctatttgggttctaatcgggcctccggggtccctgacaggttcagtggcagtggatcaggcacagattttacactgaaaatcagcagagtggaggctgaggatgttggggtttattactgcatgcaagctctacaaactccgtggacgttcggccaagggaccaaggtggaaatcaaac

SEQ ID NO: 8347 - DNA, 334 bp, synthetic construct
  misc_feature 1..334: note = Synthetic construct
  source 1..334: mol_type = other DNA
cagtctgtgctgacgcagccgccctcagtgtctggggccccagggcagagggtcaccatctcctgcactgggagcagctccaacatcggggcaaattatgatgtacactggtaccagcaacttccaggaacagcccccaaactcctcatctatggtaacagcaatcggccctcaggggtccctgaccgattctctggctccaagtctggcacctcagcctccctggccatcactgggctccaggctgaggatgaggctgattattactgccagtcctatgacagcagcctgagtggttgggtgttcggcggagggaccaagttgaccgtcctag

SEQ ID NO: 8348 - DNA, 322 bp, synthetic construct
  misc_feature 1..322: note = Synthetic construct
  source 1..322: mol_type = other DNA
gacatccagatgacccagtctccatcctccctgtctgcatctgttggagacagtgtcaccgtcacttgccgggcgagtcaggtcattaccaattctttagcctggtatcagcagaaaccagggaacgcccctaaactcctggtctctgctgcatccaaattggaaagtggggtccctcccaggttcagtggcagtggatctggggcgcagtacactctcaccatcaccagcctgcagcctgaagattttgcaacttattactgtcaacaatattatgatacccctcggacgttcggccaagggaccaaagtggaattcaaac

SEQ ID NO: 8349 - DNA, 334 bp, synthetic construct
  misc_feature 1..334: note = Synthetic construct
  source 1..334: mol_type = other DNA
cagtctgccttgactcagactgcctccgtgtctgggtctcctggacagtcgatcaccatctcctgcactggaaccagcagtgacgttggtggttataactatgtctcctggtaccaacaaaacccaggcaaagcccccaaactcatgatttatgatgtcagtaatcggccctcagggatttctaatcgcttctctggctccaagtctggcaacacggcctccctgaccatctctgggctccaggctgacgacgaggctgattattactgcacctcatatacaaacaacagcaattctcaggtattcggcggagggaccaagctgaccgtcctag

SEQ ID NO: 8350 - DNA, 322 bp, synthetic construct
  misc_feature 1..322: note = Synthetic construct
  source 1..322: mol_type = other DNA
gacatccggatgacccagtctccatcctccctgtctgcatctgtgggagacacagtcaccatcacttgccgggcaagtcagagcattagaaatgatttaacctggcttcagcagagaccagggcaagcccctaagcgcctcatcttttctgcttcctctttacattcgggggtcccatcgagattcagcggcagtgggtctggggcagagttcactctcacaatcaacggcctacagcctgaagattttgcaacttactactgtcttcagcacaatggttaccctcggtcgttcggccaagggaccaaagttgattttaaac

SEQ ID NO: 8351 - DNA, 325 bp, synthetic construct
  misc_feature 1..325: note = Synthetic construct
  source 1..325: mol_type = other DNA
tcctatgaggtgacacagccaccctcggtgtcagtgtccccaggacagacggccaagatcacctgctctggagatacattgtcaaagcaatatactcattggtaccagcagaagccaggccaggcccctgtgttggtaatatgtaaagacactgagaggccctcagggattcctgaacgattctctggctccagctcagggacaacagtcaccttgaccatcactggagtccaggcagaagacgaggctgactattattgtcagtcactagacagtagtggtgtttatgtggtattcggcggagggaccaagctgaccgtcctgg

SEQ ID NO: 8352 - DNA, 322 bp, synthetic construct
  misc_feature 1..322: note = Synthetic construct
  source 1..322: mol_type = other DNA
gacatccagatgacgcagtctccagcctccctgtctgcatctgttggcgacagggtcaccctcacctgccaggcgagtcaggaaatagaacatcatttaaattggtatcaagtgaagcctgggaaaggccctaaattcctgatgtccgaggcatccattttggaaacaggggtctcttcaaggttcagtggcagtggatctgggacaaatttttccttcaccatcaacaactttcagcccgaggacgtggcaacatatgtctgtcaacagtattttgatctccgtttcggtttcggccctggaaccaaggttgatctcaagc

SEQ ID NO: 8353 - DNA, 328 bp, synthetic construct
  misc_feature 1..328: note = Synthetic construct
  source 1..328: mol_type = other DNA
cagtctgccctgactcagcctgcctccgtgtctgggtctcctggacagtcgatcaccatctcctgcactggaaccagcagtgacgttggtggttataactttgtctcctggtaccaacaacacccaggcaaagcccccaaagtcatgatttatgatgtcagtaatcggccctcaggggtttctaatcgcttctctggctccaagtctggcaacacggcctccctgaccatctctgggctccaggctgaggacgaggctgattattactgcagctcgtatacaagcaacattattttatttggcggggggaccaagctgaccgtcctag

SEQ ID NO: 8354 - DNA, 322 bp, synthetic construct
  misc_feature 1..322: note = Synthetic construct
  source 1..322: mol_type = other DNA
gacatccagatgacccagtctccatcttccgtgtctgcatctgtaggagacagagtcaccatcacttgtcgggcgagtcagggtattagcagctttctagcctggtatcagcagaaaccagggaaagcccctaaactcctgatcgctgctgcatcgagtttgcaaaggggggtcccgtcaaggttcagcggcagtggatctgggacagatttcactctcaccatcagcagcctgcagcctgaagattttgcgacttactattgtcagcagactaccagtttccctctcactttcggcggagggaccaatgtagagatcaaac

SEQ ID NO: 8355 - DNA, 340 bp, synthetic construct
  misc_feature 1..340: note = Synthetic construct
  source 1..340: mol_type = other DNA
gacatcgtgatgacccagtctccagactccctggctgtgtctctgggcgagagggccaccatcaactgcaagtccagccagagtattttaaacagtgccagcaataaggaccacctagcttggtaccaacagaaagcaggacagcctcctaagctgctcttcttctgggcttctacccgagagtccggggtcccggaccgattcagtgccagcgggtctgggagtgatttcactttgaccatcagcagcctgcaggctgaggatgtggctgtttattattgtcagcactttaacggttctcctctcactttcggcggagggaccagggtggagatcaatc

SEQ ID NO: 8356 - DNA, 328 bp, synthetic construct
  misc_feature 1..328: note = Synthetic construct
  source 1..328: mol_type = other DNA
tcctatgtgctgactcagccaccctcggtgtcagtggccccaggacagacggccaggattacctgtgggggagacaacattgtgagtaaaagtgtgcactggtaccagcagaagccaggccaggcccctgtgctggtcgtctatgatgatagcgaccggccctcagggatccctgagcgattctctggcgccaactctgggaacacggccaccctgaccatcagcacggtcgaagccggggatgaggccgactatcactgtcaggtgtgggacagtagtagtgatcacccctatgtcttcggaactgggaccaaggtcaccgtcctag

SEQ ID NO: 8357 - DNA, 322 bp, synthetic construct
  misc_feature 1..322: note = Synthetic construct
  source 1..322: mol_type = other DNA
gccatccagttgacccagtctccatccttcctgtctgcatctgtaggagacagagtcaccatcacttgccgggccagtcagggcattagcagttatttagcctggtatcagcaaaaaccagggaaagcccctaagctcctgatctatgctgcatccactttgcaaagtggggtcccatcaaggttcagcggcagtggatctgggacagaattcactctcacaatcagcagcctgcagcctgaagattttgcaacttattactgtcaacagcttaatagttacccgctcactttcggcggagggaccaaggtggagatcaaac

SEQ ID NO: 8358 - DNA, 331 bp, synthetic construct
  misc_feature 1..331: note = Synthetic construct
  source 1..331: mol_type = other DNA
cagtctgccctgactcagcctgcctccgtgtctgggtcgccgggacagtcgatcaccatctcctgcactggaaccagcagtgacgttggtgcttatagttttgtctcctggtttcaacaacacccaggcagagcccccaaactcatgatttatggggtcactaatcggccctcaggggtttcttatcgcttctctggctccaagtctggcaacacggcctccctgaccatctctggcctccaggctgaggacgaggctgattatttctgcaactcatatacaagcagcagcacttatgtcttcggaactgggaccaaggtcaccgtcctag

SEQ ID NO: 8359 - DNA, 322 bp, synthetic construct
  misc_feature 1..322: note = Synthetic construct
  source 1..322: mol_type = other DNA
gatgtagtgatgacacagtctccagccaccctgtctgtgtctccaggggaatcagccaccctctcctgcagggccagtcagagtgtaagcagcaatttagcctggtaccagcagaaacctggccaggctcccaggctcctcttctatggtgcatctaccagggccactggtatcccagccaggttcagtggtagtggatttgggacagagttcactctcaccatcttcaacgtgcagtctgaagattgtgcagtttattactgtcaacactataatgactggcaaatcactttcggcggagggaccaagatgcagatcaaac

SEQ ID NO: 8360 - DNA, 322 bp, synthetic construct
  misc_feature 1..322: note = Synthetic construct
  source 1..322: mol_type = other DNA
gacatccagatgacccagtctccatcctccctgtctgcgtctgtaggagacagagtcaccatcacttgccgggcaagtcagagcattagcttctatttaaattggtatcagcagaaaccagggaaagcccctcagctcctgatctatgctacatccagttttcatggtggggtccctgcaaggttcactggcagtggatctgggacagatttcactctcactatcaacactctgcaacctgaagattttgcaacttactactgcgaacagacctatagtattccgtggactttcggccaagggaccaaggtggaaatcaaac

SEQ ID NO: 8361 - DNA, 322 bp, synthetic construct
  misc_feature 1..322: note = Synthetic construct
  source 1..322: mol_type = other DNA
caaattgtgttgacacagtctccagccaccctgtctttgtctccaggggaaagagccaccctctcctgcagggccagtcagggtgttggcagctacttagcctggtaccaacagagacctggccaggctcccaggctcctcatctatgatgcatccaacaggcccactggcatcccaggcaggttcagtgccagtgggtctgggacagacttcactctcaccatcagcagcctagagcctgaagattttgcagtttattactgtcagcagcgtttcaagtggcccatcaccttcgcccaagggacacgactggagattaaac

SEQ ID NO: 8362 - DNA, 334 bp, synthetic construct
  misc_feature 1..334: note = Synthetic construct
  source 1..334: mol_type = other DNA
cagtctgttctgacgcagccgccctcagtgtctggggccccaggacagagggtcaccatctcctgcactgggagtagttccaacatcgggggcaatcatgatgtacattggtaccagcaccttccagggacagcccccaaactcctcatctatggtaacaacaatcggccctcaggggtccctgaccgattctctggctccaagtctgccacctcagcctccctggccatcactgggctccaggctgaggatgaggctgattattactgccagtcctttgacgacagcctgaatgcttcgctgttcggcggtgggaccaagctgaccgtcctag

SEQ ID NO: 8363 - DNA, 334 bp, synthetic construct
  misc_feature 1..334: note = Synthetic construct
  source 1..334: mol_type = other DNA
cagtctgccctgactcagcctgcctccgtgtctgggtctcctggacagtcgatcaccatctcctgcactggaaccagcactgacgttggtggttataactatgtctcctggtaccaacaaaacccaggcaaagcccccaaactcatgatttatgatgtcagtgatcggccctcagggatttctaatcgcttctctggctccaagtctggcaacacggcctccctgaccatctctgggctccaggctgacgacgaggctgattattactgcacctcatatacaaacgacagcaattctcaggtattcggcggagggaccaagctgaccgtcctag

SEQ ID NO: 8364 - DNA, 325 bp, synthetic construct
  misc_feature 1..325: note = Synthetic construct
  source 1..325: mol_type = other DNA
tcttctgagctgactcaggaccctgctatgtctgtggccgtgggacagcaagtcaccatcacatgccacggagacagcctccgagaacatgctgccaattggtaccagcagaagtcaggacaggccccgaaacttgtcatttatggtaaaaggaatcggccctcagggatcccagaccgattcattggctccgcctcaggaagcacagcttacttgatcatcaataacattgaggcggacgatgaggctgactattattgtaactgccgagacaccagtggtgacccttgggtgttcggcagagggaccaagttgaccgtcctgc

SEQ ID NO: 8365 - DNA, 162 bp, synthetic construct
  misc_feature 1..162: note = Synthetic construct
  source 1..162: mol_type = other DNA
gagggatcccagaccgattcattggctccgcctcaggaagcacagcttacttgatcatcaataacattgaggcggacgatgaggctgactattattgtaactgccgagacaccagtggtgacccttgggtgttcggcagagggaccaagttgaccgtcctgc

SEQ ID NO: 8366 - DNA, 325 bp, synthetic construct
  misc_feature 1..325: note = Synthetic construct
  source 1..325: mol_type = other DNA
gaaattgtgttgacacagtctccagccaccctgtctttgtctccaggggaaagagccaccctctcctgcagggccagtcacagtattagcagctacttagcctggtaccaacagaaacctggccagtctcccaggctcctcatctatgatgcatccaacagggccactggcatcccagccaggttcggtggcagtgggtctgggacagacttcactctcaccatcagcagcctagagcctggagactttgcagtttattactgtcagcagcgtagcaactggccctcggtcactttcggccctgggaccaaagtggatatcaaac

SEQ ID NO: 8367 - DNA, 337 bp, synthetic construct
  misc_feature 1..337: note = Synthetic construct
  source 1..337: mol_type = other DNA
gatattgtgatgacccagactccactctcctcacctgtcacccttggacagccggcctccatctcctgcaggtctagtcaaggcctcgtacacagtgatggaaacacctacttgacttggcttcagcagaggccaggccagcctccaagactcctcatttatatgatttctaaccggttctctggggtcccagacagattcagtggcagtggggcagggacagatttcacactgaaaatcagcagggtggaagctgaggatgtcggggtttattactgcacgcaagctacacaattcccctacacttttggccaggggaccaagctggagatcaaac

SEQ ID NO: 8368 - DNA, 322 bp, synthetic construct
  misc_feature 1..322: note = Synthetic construct
  source 1..322: mol_type = other DNA
gacatccagatgacccagtctccctcttccgtgtctgcatctgttggagacagagtcaccatcacttgtcgggcgagtcagggtattagcagttggttagcctggtatcaacagaagccagggaaagcccctaaactcctgatatatgctacatccagtttgcagggtggggtcccatcgaggttcagcggcggtggatctgggacagaattcactctcaccatcagcagcctgcagcctgaagattccgcaatttactattgtcaacaggctaacagtttacctctcactttcggcggcgggaccaaggtggagatcaatc

SEQ ID NO: 8369 - DNA, 322 bp, synthetic construct
  misc_feature 1..322: note = Synthetic construct
  source 1..322: mol_type = other DNA
gaaattgtgctgactcagtctccagactttcagtctgtgactccaaaggagaaagtcaccatcacctgccgggccagtcagagcattggtaatagcttacactggtaccagcaaaaatcaaatcagtctccacagctcctcatcaagtatgcttcccagtccatctcaggggtcccctcgaggttcagtggcagtggatctgggacagatttcaccctcagcatcaatagcctggaagctgaagatgctgcaacgtattactgtcatcaaagtagtagtttaccgtacacttttggccaggggaccaagctggagatcaaac

SEQ ID NO: 8370 - DNA, 325 bp, synthetic construct
  misc_feature 1..325: note = Synthetic construct
  source 1..325: mol_type = other DNA
gaaattgtgttgacgcagtctccaggcaccctgtctttgtctccaggggaaagagccaccctctcctgcagggccagtcagagtgttaacagtaactacttagcctggtaccagcacaaacctggccaggctcccaggctcctcatctatgctgcatccagcagggccactggcatcccagacaggttcagtggcagtgggtctgggacagacttcactctcaccatcaacagactggagcctgaagattttgcattttattactgtcagcagtatggtagttcacctcggacgttcggtcaagggaccaaggtggaaatcaaac

SEQ ID NO: 8371 - DNA, 310 bp, synthetic construct
  misc_feature 1..310: note = Synthetic construct
  source 1..310: mol_type = other DNA
gacatccagatgacccagtctccatcctccctgtctgcatctgtgggagacagagtcaccatcacttgccgggcaagtcagtccattaactactatttaaattggtatcaaaagaagccagggacagcccctaagctcctgatctatgctgcaagtattttgcaaaatggggtcccctcaaggttcagtggcagtgggtctgggacagatttctctctcaccatcagcagtctccaacctgaagattttgcaacttactactgtcaacagagtggcactttcggcggagggaccaaggtggagttcaagc

SEQ ID NO: 8372 - DNA, 319 bp, synthetic construct
  misc_feature 1..319: note = Synthetic construct
  source 1..319: mol_type = other DNA
gacatccagatgacccagtctccttccatcctgtctgcatctgtaggagacagagtcaccatcacttgccgggccagtcagagtattagtagctggttggcctggtatcagcagaaaccagggaaagcccctaaactcctgatctatagggcgtctggtttagaaactggagtcccatccaggttcagcggcagtggatctgggaccgaattcactctcaccatcaacagcctgcagcctgatgattttgcaacttattactgccaacagtatcattcttattcgacgttcggccaagggaccaaggtggagatcaaag

SEQ ID NO: 8373 - DNA, 328 bp, synthetic construct
  misc_feature 1..328: note = Synthetic construct
  source 1..328: mol_type = other DNA
gaaatagtgatgacgcagtctccagccaccctgtctgtgtctccaggggaaagagtcaccctctcctgcagggccagtcagagtgttagcagcaacttagcctggtaccagcagaaacctggccaggctcccaggctcctcatctatggtgcttccacgagggccactggtatcccagccaggttcagtggcagtgggtctgggacagagttcactctcaccatcagcagcctgcagtctgaagattttgcagtttattactgtcaggagtataatagctggcctccggagtacgcttttggccaggggaccagcctggagatcaaaa

SEQ ID NO: 8374 - DNA, 331 bp, synthetic construct
  misc_feature 1..331: note = Synthetic construct
  source 1..331: mol_type = other DNA
gaaattgtgttgacgcagtctccaggcaccttgtctttgtctccaggggacagagccaccctctcctgcagggccagtcagactgttagcaacacctccttagcctggtaccagcagaaacctggccaggctcccagactcctcatctatggtgcatccaggagggccattgacatcccagacaggttcaggggcactgggtctgggacagacttcactctcaccatcagcagactgcaacctgaagattttgcagtgtatttctgtcagcagtatggtagctcacctccgatgtacacctttggccaggggaccaaactggagatcaaag

SEQ ID NO: 8375 - DNA, 322 bp, synthetic construct
  misc_feature 1..322: note = Synthetic construct
  source 1..322: mol_type = other DNA
gacatccagatgacccagtctccagcctccctgtctgcatctgtgggagacagagtaaccatcacttgccgggcgagtcaggccataagcaattccttagcctggtatcaacagagaccagggaaagcccctaaactcctcctctatgttgcatccagattggagagtggggtcccatccaggttcagcggcagtggatctgggacggattacactctcaccatcagcaccctgcagcctgaagattttgcaacttatttctgtcaacagttttttcgaaccccgtacacttttggccaggggaccaagctggaaatcaagc

SEQ ID NO: 8376 - DNA, 334 bp, synthetic construct
  misc_feature 1..334: note = Synthetic construct
  source 1..334: mol_type = other DNA
cagtctgccctgactcagcctgcctccgtgtctgggtctcctggacagtcgatcaccatctcctgcactggaaccagcagtgacgttggtgattataactatgtctcctggtaccaacaaaacccaggcaaagcccccaaagtcttgatttatgagggcagtaagcggccctcaggggtttctaatcgcttctctggctccaagtctggcaacacggcctccctgaccatctctgggctccaggctgacgacgaggctgattattactgcacctcatatacaaacaacagcaattctcaggtattcggcggagggaccaaggtgaccgtcctag

SEQ ID NO: 8377 - DNA, 343 bp, synthetic construct
  misc_feature 1..343: note = Synthetic construct
  source 1..343: mol_type = other DNA
cagcctgtcctgactcagccaccttcctcctccgcatctcctggagaatccgccagactcacctgcaccttgcccagtgacatcaatgttggtagccacaacatattttggtatcagcagaagccagggagccctcccaggtatctcctatattactactcagactcagataagggccagggctctggagtccccagccgcttctctgcgtccaaagatgcttcagccaatacagggattttactcatctccgggctccagtctgaggatgaggctgactattactgtatgatttggtcagacgcgtatgtcttcggaactgggaccaaggtcaccgtcctcc

SEQ ID NO: 8378 - DNA, 322 bp, synthetic construct
  misc_feature 1..322: note = Synthetic construct
  source 1..322: mol_type = other DNA
gacatccagatgacccagtctccatcctccctgtctgcgtctgtaggagacagagtcagcatcacttgccaggcgagtcaggacattaccaaatatttaaattggtatcagtggaaaccagggaaagcccctaaggtcctgatttacgatgcatccaatttggaaacaggggtcccatcaaggttcagtggaggtggttctgggacacattttactttcaacataagcagcctgcagcctgaagatattggaacatattactgtcaacagtatgatgatcttccgctcactttcggcggagggaccaaggtggagatcaagc

SEQ ID NO: 8379 - DNA, 210 bp, synthetic construct
  misc_feature 1..210: note = Synthetic construct
  source 1..210: mol_type = other DNA
caggcaaagcccccaaagtcttgatttatgagggcagtaagcggccctcaggggtttctaatcgcttctctggctccaagtctggcaacacggcctccctgacaatctctgggctccaggctgacgacgaggctgattattactgcacctcatatacaaacaacagcaattctcaggtattcggcggagggaccaagctgaccgtcctag

SEQ ID NO: 8380 - DNA, 322 bp, synthetic construct
  misc_feature 1..322: note = Synthetic construct
  source 1..322: mol_type = other DNA
gacattcagatgacccagtctccatcttccgtgtctgcatctgtaggagacagggtcaccatctcttgtcgggcgagtcagggtgctcacaaatggttagcctggtatcagcagaaagcagggaaggccccaaagctcctgatctatgctgcatccactttacaagttggggtcccatccaggttcagcggcgatggatttgggacagatttcacgctcaccatcagcagcctgcagcctgaagattccgcaacttactattgtcaacaggctgacaatttgccgtggacgttcggccaagggaccagggtggacgtcagac

SEQ ID NO: 8381 - DNA, 328 bp, synthetic construct
  misc_feature 1..328: note = Synthetic construct
  source 1..328: mol_type = other DNA
gaaattgtgttgacacagtctccagtcaccctgtctttgtctccaggggaaagagccaccctctcctgcagggccagtcagagtgtcagaaactccttagcctggtaccagtacaaatctggccaggctcccaaactcctcatctttgatgcgtccaacagggccactggcatccccgccaggttcagtggcagtgggtttgggacagacttcactctcaccatcagcagcctagagcctgacgattttgctgtttattactgtcagcagcgtagcgactggcctccggtgtacacttttggccaggggaccaagctggagatcacgc

SEQ ID NO: 8382 - DNA, 331 bp, synthetic construct
  misc_feature 1..331: note = Synthetic construct
  source 1..331: mol_type = other DNA
cagtctgtgttgacgcagccgccctcagtgtctgcggccccaggacaggaggtcaccatctcctgctctggaaacatctccaacattgggagaaattatgtctcctggtatcagcagttcccaggagcagcccccgaactcctcctttttgacaataataagcgctccccagggactcctgaccgaatccatggcttccggtctggcacgtcagccagagtggccatcaccgacctccaaactggggacgaggccgactattactgcgccgcttgggacgaccacctgcgaattgtgggtttcggcggggggaccaagctgaccgtcctgg

SEQ ID NO: 8383 - DNA, 286 bp, synthetic construct
  misc_feature 1..286: note = Synthetic construct
  source 1..286: mol_type = other DNA
cagtctgccctgactcagcctgcctccgtgtccgggtttggtggttataactatgtctcctggtaccaacaaaacccaggcaaagcccccaaactcatgatttatgatgtcagtaatcggccctcagggatttctaatcgcttctctggctccaagtctggcaacacggcctccctgaccatctctgggctccaggctgacgacgaggctgattattactgcacctcatatacaaacgacagcaattctcaggtattcggcggagggaccaagctgaccgtcctag

SEQ ID NO: 8384 - DNA, 325 bp, synthetic construct
  misc_feature 1..325: note = Synthetic construct
  source 1..325: mol_type = other DNA
tcctatgtgctgactcagccaccctcagtgtcagtggccccaggaaagacggccaggattacctgtggaggaaacaacattggaagtaaaagtgtgcagtggtaccagcagaagccaggccaggcccctgtgctggtcgtctatgatgatagcgaccggccctcagggatccctgagcgattctctggctccaactctgggaacacggccaccctgaccatcagcagggtcgaagccggggatgaggccgactattattgtcaggtgtgggatagtagtagtgatccccgggtgttcggcggagggaccaacctgaccgtcctag

SEQ ID NO: 8385 - DNA, 340 bp, synthetic construct
  misc_feature 1..340: note = Synthetic construct
  source 1..340: mol_type = other DNA
gacatcgtgatgacccagtctccagactccctggctgtgtctctgggcgagagggccaccatcaactgcaagtccagccagagtgttttatacagctcctacaataagagctacttaggttggtaccagcagaaaccaggacagcctcctaagttgctcctttactgggcatctatccgggaatccggggtccctgaccgattcagtggcagcgggtctgggacagatttcactctcaccatcagcagcctgcaggctgaagatgtggcaatttattactgtcagcaatattatagtactccgtggacgttcggccaagggaccaaggtggaaatcaaac

SEQ ID NO: 8386 - DNA, 331 bp, synthetic construct
  misc_feature 1..331: note = Synthetic construct
  source 1..331: mol_type = other DNA
cagtctgtgctgactcagccaccctcagcgtctgggacccccgggcagagggtcaccgtctcttgctctggaagcagctccaacatcggaagtaatactgtaaattggtaccagcagctcccaggaacggcccccaaactcctcatttataggaataatcagcggccctcaggggtccctgaccgattctctggctccaagtctggcatctcagcctccctggccatcagtgggctccaggctgaggatgaggctgattattactgtgcagcatgggatgacagcctgaatggtcccgtcttcggcggagggaccaaggtgaccgtccttg

SEQ ID NO: 8387 - DNA, 334 bp, synthetic construct
  misc_feature 1..334: note = Synthetic construct
  source 1..334: mol_type = other DNA
cagtctgtgctgacgcagccgccctcagtgtccggggccgcagggcagagggtcaccatctcctgcactgggagcagctccaacatcggggcaggttatgatatacactggtaccaggaccttccaggaacagcccccaaactcctcatctatggcaacaacaatcggccctcaggggtccctgaccgattctctggctccaagtctggcacctcagcctccctggccatcactgggctccaggctgaggatgaggctgattattactgccagtcctatgacaacagcctgagtggttatgtcttcggaactgggaccaaggtcaccgtcctag

SEQ ID NO: 8388 - DNA, 331 bp, synthetic construct
  misc_feature 1..331: note = Synthetic construct
  source 1..331: mol_type = other DNA
cagtctgtggtgactcagccaccctcagtgtctgggacccccggacagagggtctccatctcttgttctggaagcagctccaacctcggaagtaacactgttaattggtaccagcatcgctcaggatcggcccccaaagtcctcatctatagtaatgatctgcggccctcaggggtccctgaccgattctctggctccaagtctggcacctcagcctccctggccatcagtggcctccagtctggagatgaggctgattatttctgtgtcgtttgggatgtcagactgagtgggtatgtcttcggaactgggaccaaactcaccgtcctag

SEQ ID NO: 8389 - DNA, 322 bp, synthetic construct
  misc_feature 1..322: note = Synthetic construct
  source 1..322: mol_type = other DNA
gacatccagatgacccagtctccatcttccgtgtctgcatctgtaggagacagagtcaccatcacttgtcgggcgagtcagggtattagcagctggttagcctggtatcagcagaaaccagggaaagcccctaagctcctgatctatgctgcatccagtttgcaaagtggggtcccatcaaggttcagcggcagtggatctgggacagatttcactctcaccatcagcagcctgcagcctgaagattttgcaacttactattgtcaacaggctaacagtttcccctacacttttggccaggggaccaagctggagatcaaac

SEQ ID NO: 8390 - DNA, 322 bp, synthetic construct
  misc_feature 1..322: note = Synthetic construct
  source 1..322: mol_type = other DNA
gacatccagatgacccagtctccatcctccctgtctgcatctataggagacagagtcaccatcacttgccgggcaagtcagaacattggcaggtatttaaattggtatcagcaaaaaccagggaaagcccctaagctcctgatctatggtgcatccagtttccaaagtggggtcccatcaaggttcagtggcagttcatctgggacagatttcactctcaccatcaccagtctgcaacctgaagactttgcaacttactactgtcaacagggttacagtaccccattcactttcggccctgggactaaagtgggtatcagac

SEQ ID NO: 8391 - DNA, 325 bp, synthetic construct
  misc_feature 1..325: note = Synthetic construct
  source 1..325: mol_type = other DNA
tcctatgtgctgactcagccaccctcggtgtcagtggccccaggacagacggccaggatcacctgtgggggaaacaacattatatctaaaagtgtgtattggtatcgacagaagtcaggccaggcccctttactggtcgtctctgatgatcgggaccggccctcagggatccctgagcgattttccggctccaattctgggaacacggccaccctgatcatctccagggtcgaagccggggatgaggccgactatttttgtcaggtgtgggatagtattagtgagcatcaagtgttcggcggagggaccaagctgaccgtcctag

SEQ ID NO: 8392 - DNA, 331 bp, synthetic construct
  misc_feature 1..331: note = Synthetic construct
  source 1..331: mol_type = other DNA
cagtctgtgttgacgcagccgccctcagtgtctgcggccccaggacagaaggtcaccatctcctgctctggaaacatctccaacattgggactaattatgtttcctggtaccagcacttcccaggaacagcccccaaactcttcatttatgacaacaataagcgaccctcagggactcctgaccgagtccacggcttcaggtctggcacgtcagccaggttggtcatcaccgaactccacactggggacgaggccgattattactgcggagcctgggacagcagcctgagagcggtggtgttcggcggcgggaccaagctgaccgtcctag

SEQ ID NO: 8393 - DNA, 322 bp, synthetic construct
  misc_feature 1..322: note = Synthetic construct
  source 1..322: mol_type = other DNA
gacatccagatgacccagtctccatcctccctgtctgcatctgtaggagacagagtcaccatcacttgccgggcgagtcagggcaatggctactctttagcctggtatcagcagaaaccagggaaagcccctaagctcctactctattctgcctccacattggaaagtggggtcccatccaggttcagtggcagtggatctgggacggattacactctcaccatcaccagcctgcagcctgaagatttagcgacttattattgtcaacagtattatagtctccctctcactttcggcggagggaccaaggtggagatcagac

SEQ ID NO: 8394 - DNA, 334 bp, synthetic construct
  misc_feature 1..334: note = Synthetic construct
  source 1..334: mol_type = other DNA
cagtctgccctgactcagcctgcctccgtgtctgggtctcctggacactcgatcaccatctcctgcactggaaccagcagtgacgttggtggttataactatgtctcctggtaccaacaaaacccaggcaaagcccccaaactcatgatttatgatgtcaataatcggccctcagggatttctaatcgcttctctggctccaagtctggcaacacggcctccctgaccatctctgggctccaggctgacgacgaggctgattattactgcacctcatatacaaacgacaccaattctcaggtattcggcggagggaccaagctgaccgtcctag

SEQ ID NO: 8395 - DNA, 325 bp, synthetic construct
  misc_feature 1..325: note = Synthetic construct
  source 1..325: mol_type = other DNA
gaaagtgtgttgacgcagtctccaggcaccctgtctgtgtctccaggggaaagagccaccctctcctgcagggccagtcagagtgttagcaacaactacttagcctggtaccagcagaaacctggccaggctcccaggctcctcatctatggtgcatacaccagggccactggcatcccagacaggttcagtggcagtgggtctgagacagacttcactctcaccatcagcagcctggagcctgaagattttgcagtgtatcactgtcagcagtatagttcctcacctcggacgttcggccaagggaccaaggtggaaatcaaac

SEQ ID NO: 8396 - DNA, 337 bp, synthetic construct
  misc_feature 1..337: note = Synthetic construct
  source 1..337: mol_type = other DNA
gacattgtgatgactcagacccctcgcgccctgaccgtcagtccgggcgagccggcctccatctcctgcaggtccagccagagtctccgccatagtaaaggaatcacttttttggactggtatctgcagaggccagggcagtctccacaactcctgatctattcggtttctaatcgggcctccggggtccctgacaggttcagtggcgctggatcaggcacagatttcacactgaaaatcaacagcgtggagcctggcgacgtggggatttatttctgcatgcaaagtctacagactccgccgacgttcggcctagggaccaagttggaaatcaaac

SEQ ID NO: 8397 - DNA, 322 bp, synthetic construct
  misc_feature 1..322: note = Synthetic construct
  source 1..322: mol_type = other DNA
gacatccagctgacccagtctccatcctccctgcctgcgtctattggagacacagtcaccatcacttgccgggcgagtcaaaacataaccaaccatttaaattggtatcagcagagacctgggaaggcccctaaactcctgatctttgctgcatttactttgcaaaacggggtcccatcaaagttcagtggcagtggatctgggacagatttcactctcaccatcatcggtctgcaacctgacgattttgcgacttactactgtcaacagagtttcagctccctttggacgttcggccaagggaccaaggtggtactccaac

SEQ ID NO: 8398 - DNA, 331 bp, synthetic construct
  misc_feature 1..331: note = Synthetic construct
  source 1..331: mol_type = other DNA
cagtctgccctgactcagcctgcctccgtgtctgggtctcctggacagtcgatcaccatctcctgcactggatccagcagtgacgttggtacttataactatgtctcctggtatcaacaatacccaggcaaagcccccaaactcatgatttatgatgtcagtaatcggccctcagggatttctaatcgcttctctggctccaagtctggcaacacggcctccctgactatctctgggctccaggctgaggacgaggctgcttattactgcagctcctatacaagcggtcgtattctggttttcggcggagggaccaaactgaccgtccttg

SEQ ID NO: 8399 - DNA, 337 bp, synthetic construct
  misc_feature 1..337: note = Synthetic construct
  source 1..337: mol_type = other DNA
aatattgtgatgactcagtctccattttccctgtccgtcacccctggagaggcggcctccatctcctgcaggtctagtcagagcctcctgcatactaatggatacaactatttggattggtatttgcagaagccagggcagtctccacagctcctgatctatctccgttctaatcgggcctccggggtccctgacagattcagtggcagtggatcaggcacagattttacactgaaaatcagcagagtggaggctgaggatgttggggtttattactgcatgcaaactctacaaactcctctcactttcggcggagggaccaaggtggagatcaaac

SEQ ID NO: 8400 - DNA, 322 bp, synthetic construct
  misc_feature 1..322: note = Synthetic construct
  source 1..322: mol_type = other DNA
gccatccggatgacccagtctccatcctcactctctgcatctacaggagacagagtcaccatcacttgtcgggcgagtcagggtattagcagttatttagcctggtatcagcaaaaaccagggaaagcccctaagctcctgatctatgctgcatccactttgcaaagtggggtcccatcaaggttcagtggcagtggatctgggacagatttcactctcaccatcagctgcctgcagtctgaagattttgcaacttattactgtcaacagtattatagttaccccctcactttcggcggagggaccaaggtggagatcaaac

SEQ ID NO: 8401 - DNA, 325 bp, synthetic construct
  misc_feature 1..325: note = Synthetic construct
  source 1..325: mol_type = other DNA
tcttctgagctgactcaggaccctgctgtgtctgtggccttgggacagacagtcaggatcacatgccaaggagacagcctcagaagctattatgcaagctggtaccagcagaagccaggacaggcccctgtacttgtcatctatggtaaaaacaaccggccctcagggatcccagaccgattctctggctccagctcaggaaacacagcttccttgaccatcactggggctcaggcggaagatgaggctgactattactgtaactcccgggacagcagtggtaaccattgggtgttcggcggagggaccaagctgaccgtcctag

SEQ ID NO: 8402 - DNA, 334 bp, synthetic construct
  misc_feature 1..334: note = Synthetic construct
  source 1..334: mol_type = other DNA
cagtctgccctgactcagcctgcctccgtgtctgggtctcctggacagtcgatcaccatctcctgcactggaaccagcagtgacgttggtggttataactatgtctcctggtaccaacaaaacccaggcaaagcccccaaactcatgatttatgatgtcaataatcggccctcagggatttctaatcgcttctctggctccaagtctggcaacacggcctccctgaccatctctgggctccaggctgacgacgaggctgattattactgcacctcatatacaaacgacaccaattctcaggtattcggcggagggaccaagttgaccttcctag

SEQ ID NO: 8403 - DNA, 325 bp, synthetic construct
  misc_feature 1..325: note = Synthetic construct
  source 1..325: mol_type = other DNA
gaaattgtgttgacgcagtctccaggcaccctgtctttgtctccaggggaaagagccaccctctcctgcagggccagtcagagtgtaagcagcagcttcttagcctggtaccagcagaaacctggccaggctcccaggctcctcatctatggtgcatccagcagggccactggcatcccagacaggttcagtggcagtgggtctgggacagacttcattctcaccatcagcagactggagcctgaagattttgcagtgtattgctgtcaccagtatagtacctcaccgtggacgttcggccgagggaccaaggtggaaatcaaac

SEQ ID NO: 8404 - DNA, 331 bp, synthetic construct
  misc_feature 1..331: note = Synthetic construct
  source 1..331: mol_type = other DNA
cagtctgtgttgacgcagccgccctcagtgtctgcggccccaggacagaaggtcaccatctcctgctctggaagcagctccaacattgggaataattatgtatcctggtaccagcagctcccaggaacagcccccaaactcctcatctatgaaaataataagcgaccctcagggattcctgaccgattctctggctccaagtctggcacgtcagccaccctgggcatcaccggactccagactggggacgaggccgattattactgcggaacatgggatagcagcctgagtgctgtggtattcggcggagggaccaagctgaccgtcctag

SEQ ID NO: 8405 - DNA, 331 bp, synthetic construct
  misc_feature 1..331: note = Synthetic construct
  source 1..331: mol_type = other DNA
cagtctgtgttgacgcagccgccctcagtgtctgcggccccaggacagaaggtcaccatctcctgctctggaagcagctccaacattgggaataattatgtatcctggtaccagcagctcccaggaacagcccccaaactcctcatttatgacaataataagcgaccctcagggattcctgaccgattctctggctccaagtctggcacgtcagccaccctgggcatcaccggactccagactggggacgaggccgattattactgcggaacatgggatagcagcctgagtgctaaagtattcggcggagggaccaagctgaccgtcctag

SEQ ID NO: 8406 - DNA, 325 bp, synthetic construct
  misc_feature 1..325: note = Synthetic construct
  source 1..325: mol_type = other DNA
gacatccagatgacccagtctccatcctccctgtctgcatctgtaggagacagagtcaccatcacttgccgggcaagtcagagcattagcagctatttaaattggtatcagcagaaaccagggaaagcccctaagctcctgatctatgctgcatccagtttgcaaagtggggtcccatcaaggttcagtggcagtggatctgggacagatttcactctcaccatcagcagtctgcaacctgaagattttgcaacttactactgtcaacagagttacagtacccccccgtacacttttggccaggggaccaagctggagatcaaac

SEQ ID NO: 8407 - DNA, 126 bp, synthetic construct
  misc_feature 1..126: note = Synthetic construct
  source 1..126: mol_type = other DNA
gcaacacggcctccctgaccatctctgggctccaggctgacgacgaggctgattattactgcacctcatatacaaacgacagcaattctcaggtattcggcggagggaccaagctgaccgtcctag

SEQ ID NO: 8408 - DNA, 322 bp, synthetic construct
  misc_feature 1..322: note = Synthetic construct
  source 1..322: mol_type = other DNA
gacatccagatgacccagtctccatcctccctgtctgcatctgtaggagacagagtcaccatcacttgccgggcaagtcagagcattagcagctatttaaattggtatcagcagaaaccagggaaagcccctaagctcctgatctatgctgcatccaatttgcaaagtggggtcccatcaaggttcagtggcagtggatctgggacagatttcactctcaccatcagcagtctgcaacctgaagattttgcaacttactactgtcaacagagttacagtacccctagaacgttcggccaagggaccaaggtggaaatcaaac

SEQ ID NO: 8409 - DNA, 319 bp, synthetic construct
  misc_feature 1..319: note = Synthetic construct
  source 1..319: mol_type = other DNA
gacatccagatgacccagtctccatcctccctgtctgcatttgttggagacagagtcaccatcacttgccaggcgagtcatgacattggcaaccatttaaattggtatcagcacaaacctgggaaagcccctaaactcctgatctacgatgtgtccaatttggatgtcggggccccatcgaggttcagcggaagtggatccgggacagagttcactttcaccatcaataacctgcagcctgatgatgttgcaatttattactgtcaacagtatgattatatccctcgcttcggccctgggaccaaagtggatttgaaac

SEQ ID NO: 8410 - DNA, 334 bp, synthetic construct
  misc_feature 1..334: note = Synthetic construct
  source 1..334: mol_type = other DNA
cagtctgccctgactcaggctgcctccgtgtctgggtctcctggacagtcgatcaccatctcctgcactggaaccaacactgatgttgggagttataaccttgtctcctggtaccaaaaccacccaggcaaagcccccaaagtcttgatttatgagggcagtaagcggccctcaggggtttctaatcgcttctctggctccaagtctggcaacacggcctccctgacaatctctgggctccaggctgacgacgaggctgattattactgcacctcatatacaaacgacagcaattctcaggtattcggcggagggaccaagctgaccgtcctac

SEQ ID NO: 8411 - DNA, 319 bp, synthetic construct
  misc_feature 1..319: note = Synthetic construct
  source 1..319: mol_type = other DNA
gccatccggataacccagtctccatcctcactctctgcatctacaggaggcagagtcaccatcacttgtcgggcgagtcagagtattgccacttatttagcctggtatcagcaaaaaccagggaaagcccctaagctcctgatctctggtgcttccactttgcaaagtggggtcccatcaaggtttagcggcagtggatctgggacagatttcactctcaccatcagctgcctgcagtctgaggatttcgcaacttattactgtcaacaatattattcttactctacgttcggccaagggaccaaggtggagctcaatc

SEQ ID NO: 8412 - DNA, 340 bp, synthetic construct
  misc_feature 1..340: note = Synthetic construct
  source 1..340: mol_type = other DNA
gacatcgtgatgacccagtctccagcctccctggctgtgtctctgggcgagagggccaccatcaactgcaagtccagccagactattttattcaactccaacaataagaactacttagcttggtaccagcagaaaccaggacagcctcctaagctgctcatttactgggcatctacccgggaatccggggtccttgaccgattcagtggcagcgggtctgggacagatttcactctcaccatcagcagccttcaggctgaagatgtggcagtttattactgtcagcaatattttagtactccgtacacttttggccaggggaccaagctggagatcaaac

SEQ ID NO: 8413 - DNA, 325 bp, synthetic construct
  misc_feature 1..325: note = Synthetic construct
  source 1..325: mol_type = other DNA
gaaattgtgttgacacagtctccagccaccctgtctttgtctccaggggaaagagccaccctctcctgcagggccagtcagagtgttagcagttacttagcctggtaccaacaaaaacctggccaggctcccaggctcctcatctatgatgcatccaacagggccactggcatcccagccaggttcagtggcagtgggtctgggacagacttcactctcaccatcagcagcctcgagcctgaagatttcgcagtttattactgtcagcagcgtagcacctggcctccggggactttcggccctgggaccaaagtggaaatcaaac

SEQ ID NO: 8414 - DNA, 322 bp, synthetic construct
  misc_feature 1..322: note = Synthetic construct
  source 1..322: mol_type = other DNA
gacatccagatgacccagtctcctttcaccctgtctgcatctgtcggcgacagaatcaccatcacttgccgggccagtcagagtattaatagttggttggcctggtttcagcagaaaccagggaaagcccctaaactcctgatctatcagtcatcttctttagaaaatggggtcccatcaagattcagcggcagtgggtctgggacagaatttactctcaccatcagcagcctgcaggctgatgattttgcaacttattattgccaacaatatgagagttatccgatcactttcggccaagggacacgactggagattaaac

SEQ ID NO: 8415 - DNA, 322 bp, synthetic construct
  misc_feature 1..322: note = Synthetic construct
  source 1..322: mol_type = other DNA
gccatccggatgactcagtctccatcctcactctctgcatctacaggagacagagtcaccatcacttgtcgggcgagtcttcatattagcacttatttagcctggtatcagcagaaaccagggaaagcccctaggctcctgatccatggtgcatccactttgcaaagtggggtcccatcaaggttcagcggcggtggatctgggacaaatttcactctcaccatcaactgcctgcagtctgaagattttgcaacatattactgtcaacattattataattaccctttcactttcggccctgggaccaaagtggatatcaaac

SEQ ID NO: 8416 - DNA, 308 bp, synthetic construct
  misc_feature 1..308: note = Synthetic construct
  source 1..308: mol_type = other DNA
gaaattgtgttgacgcagtctccaggcaccctgtctttgtctccaggggaaagagccaccctctcctgcagggccagtcagagtgttagcagcagctacttagcctggtaccagcagaaacctggccaggctcccaggctcctcatctatggtgcatccagcagggccactggcatcccagacaggttcagtggcagtgggtctgggacagacttcactctcaccatcagcagactggagcctgaagattctgcagtatattactgtcagcagtatggcagctcacctcccccgtacacttttggcca

SEQ ID NO: 8417 - DNA, 322 bp, synthetic construct
  misc_feature 1..322: note = Synthetic construct
  source 1..322: mol_type = other DNA
gacatccagatgacccagtctccatctgccatatctgcatctgttggagacagagtcaccatcacttgtcgggcgagtcagcccatcagtcagtatttagcctggtttcagcagagaccagggaaagtccctaagcgcctgatctatggtgcatccactttgcaatatggggtcccatcaaggttcagcggtagtggatctgggacagaattcactctcacaatcagcagcctgcagcctgaagattttgcaacttattactgtctacagcataatagttaccctcggacgttcggccaagggaccaagttggaaatcaaac

SEQ ID NO: 8418 - DNA, 340 bp, synthetic construct
  misc_feature 1..340: note = Synthetic construct
  source 1..340: mol_type = other DNA
gacatcgtgatgacccagtctccagactccctggctgtgtctctgggcgagagggccaccatcaactgcaagtccagccagagtgttttatacagctccaacaataagaactacttagcttggtaccagcagaaaccaggacagcctcctaagctcctcatttactgggcatctacccgggaatccggggtccctgcccgattcagtggcagcgggtctgggacagatttcactctcaccatcagcagcctgcaggctgaagatgtggcagtgtattactgtcaacaatattataatactccgtacacttttggccaggggaccaagctggagatcaaac

SEQ ID NO: 8419 - DNA, 322 bp, synthetic construct
  misc_feature 1..322: note = Synthetic construct
  source 1..322: mol_type = other DNA
gaaatagtgatgacgcagtctctagccaccctgtctgtgtctcgaggggaaagagccaccctctcctgcagggccagtcagagtgttagcagcaacttagtctggtaccagcagaaacctggccaggctcccaggctcctcatctatggtgcatccaccagggccactggtatcccagccaggttcagtggcagtgggtctgggacagagttcactctcaccatcagcagcctgcagtctgaagattttgcagtttattactgtcagcagtataataactggcctcacacttttggccaggggaccaagctggagatcaaac

SEQ ID NO: 8420 - DNA, 334 bp, synthetic construct
  misc_feature 1..334: note = Synthetic construct
  source 1..334: mol_type = other DNA
cagcttgtgctgagtcaatcgccctctgcctctgcctccctgggagcctcggtcaaactcacctgcactctgagcagtgagcacgacacctatgccatcgcatggcatcagcagcagccagagaagggccctcgatatttgatgaagattaaaagtgatggcagttacaacaagggggacgggatccctggtcgcttctcaggctccagctctggggctgagcgctacctcaccatctccagcctccagtctgaggatgaagctgactattattgtcagacctggggcaaaggcattcaggtgtttggcggagggaccaagttgaccgtcctac

SEQ ID NO: 8421 - DNA, 334 bp, synthetic construct
  misc_feature 1..334: note = Synthetic construct
  source 1..334: mol_type = other DNA
cagtctgtgctgacgcagccgccctcagtgtctggggccccagggcagagggtcaccatctcctgcaatgggagcagctccaacatcggggcagattatgatattcactggtaccaacagattcaaggagcagcccccaaactcctcatctatggtaacatcaatcggccctcaggggtccctgaccgaatctctggctccaagtctggcacctcagcctccctggccatcgctgggctccaacctgcggatgaggctgattattactgtcagtcctatgacaacagcctgagaacttcggtgttcggcggtgggaccaagctgaccgtcctag

SEQ ID NO: 8422 - DNA, 322 bp, synthetic construct
  misc_feature 1..322: note = Synthetic construct
  source 1..322: mol_type = other DNA
gaaatagtgatgacgcagtctccagccaccctgtctgtgtctccaggggaaagagccaccctctcctgcagggccagtcagagtgttagcaccaacttagcctggtaccagcagaaacctggccaggctcccaggctcctcatctttggtgcatccaccagggccactggtatcccagccaggttcagtggcagtgggtctgggacagagttcactctcaccatcagcagcctgcagtctgaagattttgcagtttactactgtcaccaatataaaaacgcggggtggacgttcggccaagggaccaaggtggaaatcaaac

SEQ ID NO: 8423 - DNA, 322 bp, synthetic construct
  misc_feature 1..322: note = Synthetic construct
  source 1..322: mol_type = other DNA
gaaattgtgttgacacagtctccagccaccctgtctttgtctccaggggaaagagccaccctctcctgcagggccagtcagagtgttaacacttactttgcctggtaccaacagaaacctggccaggctccccgactcctcatctatgaagcatctctcagggcccctggcatcccagccaggttcagtggcagtgggtctgggacagacttcactctcatcatcaacaacctcgagcctgaagattttgcgatttattcctgtcagcagcgtgacacctggccttggacgttcggccaggggaccagggtggaaatcaagc

SEQ ID NO: 8424 - DNA, 322 bp, synthetic construct
  misc_feature 1..322: note = Synthetic construct
  source 1..322: mol_type = other DNA
gccatccagttgacccagtctccatcctccctgtctgcatctgttggagacagagtcaccatcacttgccgggcaagtcagggcattcgcagtgctttagcctggtatcagcagaaaccagggaaagttcctaagctcctaatctatgatgcctccagtttggaaagtggggtcccatcaaggttcagcggcagtggatctgggacagagttcactctcaccatcagcagcctgcagcctgaggattttgcaatttattactgtcaacagtttaatagttaccctcgcactttcggccctgggaccaaagtggatttcaaac

SEQ ID NO: 8425 - DNA, 328 bp, synthetic construct
  misc_feature 1..328: note = Synthetic construct
  source 1..328: mol_type = other DNA
cagactgtggtgactcaggagccctcactgactgtgtccccaggagggacagtcactctcacctgtgcttccagcactggagcagtcaccagtggttactatccaaactggttccagcagaaacctggacaagcacccagggcactgatttatagtacaagcaacaaacactcctggacccctgcccggttctcaggctccctccttgggggcaaagctgccctgacactgtcaggtgtgcagcctgaggacgaggctgagtattactgcctgctctactatggtggtgcttgggtgttcggcggagggaccaagctgaccgtcctag

SEQ ID NO: 8426 - DNA, 325 bp, synthetic construct
  misc_feature 1..325: note = Synthetic construct
  source 1..325: mol_type = other DNA
gaaattgtgttgacgcagtctccaggcaccctgtctttgtctccaggggaaagagccaccctctcctgcagggccagtcagagtgttagcagcagctacttagcctggtaccagcagaaacctggccaggctcccaggctcctcatctatggtgcatccagcagggccactggcatcccagacaggttcagtggcagtgggtctgggacagacttcactctcaccatcagcagactggagcctgaagattttgcagtgtattactgtcagcagtatggtagctcacttatcaccttcggccaagggacacgactggagattaaac

SEQ ID NO: 8427 - DNA, 322 bp, synthetic construct
  misc_feature 1..322: note = Synthetic construct
  source 1..322: mol_type = other DNA
gaaattgtgttgacacagtctccagccaccctgtctttgtctccaggggaaagagccaccctctcctgcagggccagtcagagtgttagcagctacttagcctggtaccaacagaaacctggccaggctcccaggctcctcatctatgatgcatccaacagggccactggcatcccagccaggttcagtggcagtgggtctgggacagacttcactctcaccatcagcagcctagagcctgaagattttgcagtttattactgtcagcagcgtagcaactggcctctcactttcggccctgggaccaaagtggatatcaaac

SEQ ID NO: 8428 - DNA, 325 bp, synthetic construct
  misc_feature 1..325: note = Synthetic construct
  source 1..325: mol_type = other DNA
gaaattgtgttgacgcagtctccaggcaccctgtctttgtctccaggggaaagagccaccctctcctgcagggccagtcagagtgttagcagcagctacttagcctggtaccagcagaaacctggccaggctcccaggctcctcatctatggtgcatccagcagggccactggcatcccagacaggttcagtggcagtgggtctgggacagacttcactctcaccatcagcagactggagcctgaagattttgcagtgtattactgtcagcagtatggtagctcacctctcactttcggcggagggaccaaggtggagatcaaac

SEQ ID NO: 8429 - DNA, 322 bp, synthetic construct
  misc_feature 1..322: note = Synthetic construct
  source 1..322: mol_type = other DNA
gacatccagatgacccagtctccttccaccctgtctccatctgtaggagacagagtcactatcacttgtcgggccagtcagagtattagtagctggttggcctggtatcagcagaaaccagggaaagcccctaagctcctgatctataaggcgtctagtttagaaactggggtcccatcaaggttcagcggcagtggatctgggacagaattcactctcaccatcagcagcctgcagcctgatgattttgcaacttattactgccaacagtataatagttatccgtacacttttggccaggggaccaagctggagatcaaac

SEQ ID NO: 8430 - DNA, 322 bp, synthetic construct
  misc_feature 1..322: note = Synthetic construct
  source 1..322: mol_type = other DNA
gtcatctggatgacccagtctccatccttactctctgcatctacaggagacagagtcaccatcagttgtcggatgagtcagggcattagcagttatttagcctggtatcagcaaaaaccagggaaagcccctgagctcctgatctatgctgcatccactttgcaaagtggggtcccatcaaggttcagtggcagtggatctgggacagatttcactctcaccatcagttgcctgcagtctgaagattttgcaacttattactgtcaacagtattatagtttcccgctcactttcggcggagggaccaaggtggagatcaaac

SEQ ID NO: 8431 - DNA, 322 bp, synthetic construct
  misc_feature 1..322: note = Synthetic construct
  source 1..322: mol_type = other DNA
gacatccagatgacccagtctccttccaccctgtctgcatctgtaggagacagagtcaccatcacttgccgggccagtcagacaattagtagctggttggcctggtatcagcagaagccagggaaagcccctaaactcctgatctttaaggcatctactttagaaagtggggtcccatcaaggttcagcggcagtgcatctgagacagaattcactctcaccatcagcagcctgcagcctgatgattttgcaacttattattgccaacagtataatagttatttgtggacgttcggccaagggaccaaggtggaaatcaaac

SEQ ID NO: 8432 - DNA, 328 bp, synthetic construct
  misc_feature 1..328: note = Synthetic construct
  source 1..328: mol_type = other DNA
gaaattgtgttgacgcagtctccaggcaccctgtctttgtctccaggggaaagagccaccctctcctgcagggccagtcagagtgttagaagcagctacttagcctggtaccagcagaaacctggccaggctcccaggctcctcatctatggtgcatccaacagggccactggcatcccagacaggttcagtggcagtgggtctgggacagacttcactctcaccatcagcaggctggagcctgaagattttgcagtgtattactgtcagcagtatggtagctcaccactattcactttcggccctgggaccaaagtggatatcaaag

SEQ ID NO: 8433 - DNA, 325 bp, synthetic construct
  misc_feature 1..325: note = Synthetic construct
  source 1..325: mol_type = other DNA
tcttctgagctgactcaggaccctgctgtgtctgtggccttgggacagacagtcaggatcacatgccaaggagacagtctcagaggctattatggatgctggtaccagcagaaggcaggacaggcccctgtacttgtcatctatggtaaaaacaaccggccctcagggatcccagaccgattctctggctccacttcaggaaacacagcttccttgaccatcactggggctcaggcggaagatgaggctgactattattgtaactcccgggacagcagtggtaaccatgtggtcttcggcggagggaccaagctgaccgtcctag

SEQ ID NO: 8434 - DNA, 322 bp, synthetic construct
  misc_feature 1..322: note = Synthetic construct
  source 1..322: mol_type = other DNA
ggcatccagatgacccagtctccttcctccctgtctgcatctgttggagacagagtcaccatcacttgccaggcgagtcaggacattagcaattatttaaattggtatcaacaaaagccagggaaagcccctcacctcctgatctacgatgcgtccaatttgcagacaggggtcccatcaaggttcagtggaagtggatctgggacagattttactttcaccatcagcagcctgcagcctgaagatattgcaacatattactgtcaacagtttgataatctccctatcaccttcggccaagggacacgactggagattaaac

SEQ ID NO: 8435 - DNA, 213 bp, synthetic construct
  misc_feature 1..213: note = Synthetic construct
  source 1..213: mol_type = other DNA
acccaggcaaagcccccaaactcatgatttatgatgtcagtaatcggccctcagggatttctaatcgcttctctggctccaagtctggcaacacggcctccctgaccatctctgggctccaggctgacgacgaggctgattattactgcacctcatatacaaacaacagcaattctcaggtattcggcggagggaccaagctgaccgtcctag

SEQ ID NO: 8436 - DNA, 322 bp, synthetic construct
  misc_feature 1..322: note = Synthetic construct
  source 1..322: mol_type = other DNA
gacttccagatgacccagtctccatcctccctgtctgcatctgtaggagacagaatcaccatctcttgccgggcaactcagaccattattaactatttaaattggtatcagcaaaaaccagggaaagcccctaatttcctgatctttggtgcatccactttgcaaagtggggtcccaccaaggttcagtggcagtggatctgggacaaatttcactctcaccatcaccaatctgcaacctgaagattttgcaacttactactgtcaacagagttacagcatcccgtacacttttggccaggggaccaagctggaggtcaaac

SEQ ID NO: 8437 - DNA, 340 bp, synthetic construct
  misc_feature 1..340: note = Synthetic construct
  source 1..340: mol_type = other DNA
gatattgtgatgacccagactccactctccctgcccgtcacccctggagagccggcctccatctcctgcaggtctagtcagagcctcttggatagtgatgatggaagcacctatttggactggtacctgcagaagccagggcagtctccacagctcctaatctatacgctttcctatcgggcctctggagtcccagacaggttcagtggcagtgggtcaggcactgatttcacactgaaaatcagcagggtggaggctgaggatgttggagtttattactgcatgcaacgtatagagtttccttggacgttcggccaagggaccaaggtggaaatcaaac

SEQ ID NO: 8438 - DNA, 322 bp, synthetic construct
  misc_feature 1..322: note = Synthetic construct
  source 1..322: mol_type = other DNA
gacatccagatgacccagtctccttccgccctgtctgcatctgtaggagacagagtcaccatcacttgccgggccagtcagagtattagtacctggttggcctggtatcagcagaaaccagggaaagcccctaagctcctgatctataaggcgtctagtttagaaagtggggtcccatcaaggttcagcggcagtggatctgggacagaattcactctcaccatcagcagcctgcagcctgatgattttgtgacttattactgccaacactataatggttatccgtggacgttcggccaagggaccaaggtggaaatcaaac

SEQ ID NO: 8439 - DNA, 322 bp, synthetic construct
  misc_feature 1..322: note = Synthetic construct
  source 1..322: mol_type = other DNA
gccatccagttgacccagtctccatccttcctgtctgcatctgtaggagacagagtcaccatcacttgccgggccagtcagggcattagcagttatttagcctggtatcagcaaaaaccagggaaagcccctaagctcctgatctatgctgcatccactttgcaaagtggggtcccatcaaggttcagcggcagtggatctgggacagaattcactctcacaatcagcagcctgcagcctgaagattttgcaacttattactgtcaacagcttaatagttaccctcctcatttcggcggagggaccaaggtggagatcaaac

SEQ ID NO: 8440 - DNA, 331 bp, synthetic construct
  misc_feature 1..331: note = Synthetic construct
  source 1..331: mol_type = other DNA
cagtctgccctgactcagcctgcctccgtgtctgggtctcctggacagtcgatcaccatctcctgcactggaaccagcagtgacgttggtggttataactatgtctcctggtaccaacagcacccaggcaaagcccccaaactcatgatttatgaggtcagtaatcggccctcaggggtttctaatcgcttctctggctccaagtctggcaacacggcctccctgaccatctctgggctccaggctgaggacgaggctgattattactgcagctcatatacaagcagcagcacttatgtcttcggaactgggaccaaggtcaccgtcctag

SEQ ID NO: 8441 - DNA, 322 bp, synthetic construct
  misc_feature 1..322: note = Synthetic construct
  source 1..322: mol_type = other DNA
gacatccagatgacccagtctccatcttccgtgtctgcatctgtaggagacagagtcaccatcacttgtcgggcgagtcagggtattagcagctggttagcctggtatcagcagaaaccagggaaagcccctaagctcctgatctatgctgcatccagtttgcaaagtggggtcccatcaaggttcagcggcagtggatctgggacagatttcactctcaccatcagcagcctgcagcctgaagattttgcaacttactattgtcaacaggctaacagtttcccgtacacttttggccaggggaccaagctggagatcaaac

SEQ ID NO: 8442 - DNA, 322 bp, synthetic construct
  misc_feature 1..322: note = Synthetic construct
  source 1..322: mol_type = other DNA
gaaatagtgatgacgcagtctccagccaccctgtctgtgtctccaggggaaagagccaccctctcctgcagggccagtcagagtgttagcagcaacttagcctggtaccagcagaaacctggccaggctcccaggctcctcatctatggtgcatccaccagggccactggtatcccagccaggttcagtggcagtgggtctgggacagagttcactctcaccatcagcagcctgcagtctgaagattttgcagtttattactgtcagcagtataataactggccgtacacttttggccaggggaccaagctggagatcaaac

SEQ ID NO: 8443 - DNA, 322 bp, synthetic construct
  misc_feature 1..322: note = Synthetic construct
  source 1..322: mol_type = other DNA
gacatccagatgacccagtctccatcctccctgtctgcatctgtaggagacagagtcaccatcacttgccgggcaagtcagagcattagcagctttttaaattggtatcagcagaaaccagggaaagcccctaagctcctgatctatgctgcatccagtttgcaaagtggggtcccatcaaggttcagtggcagtggatttgggacagatttcactctcaccatcagcagtctgcaacctgaagattttgcaacttactactgtcaacagagttacagtaccctctacacttttggccaggggaccaagctggagatcaaac

SEQ ID NO: 8444 - DNA, 343 bp, synthetic construct
  misc_feature 1..343: note = Synthetic construct
  source 1..343: mol_type = other DNA
gacatcgtgatgacccagtctccagactccctggctgtgtctctgggcgagagggccaccatcaactgcaagtccagccagagtgttttatacagctccaacaataagaactacttagcttggtaccagcagaaaccaggacagcctcctgaggtgctcatttactgggcatctacccgggaatccggggtccctgaccgattcagtggcagcgggtctgggacagatttcactctcaccatcagcagcctgcaggctgaagatgtggcagtttattactgtcagcaatattatactactcccacgtggacgttcggccaagggaccaaggtggaaatcaaac

SEQ ID NO: 8445 - DNA, 193 bp, synthetic construct
  misc_feature 1..193: note = Synthetic construct
  source 1..193: mol_type = other DNA
ctgctcgtctatgatgacaaacaccggccctcagggatccctgagcgattctctggctccaattctgactccacggccacccttagcatcagcagtgtcgaggcctgggatgaggccgactattactgccaggtgtgggataacactgatgatcctgtggtattcggcggagggaccaagctgaccgtcctag

SEQ ID NO: 8446 - DNA, 322 bp, synthetic construct
  misc_feature 1..322: note = Synthetic construct
  source 1..322: mol_type = other DNA
gacatccagatgacccagtctccatcctccctgtctgcttctgtaggcgaaagagtcaccatcacttgccgggcgagtcagaccattgcaaagtctttaaattggtatcagcacaagtcagggacagcccctaaactactaatctctgctgcatccactttgaaaagtggggtcccatcaaggttcagtggcagtggatctgggacagagttcactctcaccatcagcagtctgcaacctgaagattttgcaacttactattgtcagcagagtctcagtaccctgatcacttttggccaggggaccaagctggagatcagac

SEQ ID NO: 8447 - DNA, 322 bp, synthetic construct
  misc_feature 1..322: note = Synthetic construct
  source 1..322: mol_type = other DNA
gacatccagatgacccagtctccatcctccctgtctgcatctgtaggagacagagtcaccatcacttgccgggcaggtcagagcatttacaactatttaaattggtatcagcagagaccagggaaagcccctaacctcctgatctatgctgcgtccagtttgcgaagtggggtcccgtcaaggttcagtggcagtggatctgggacagatttcactctcaccatcagcagtctgcaacctgaagattttgcagcttactactgtcaacagagttacattacccctctcactttcggccctgggaccaaaatagatattaaac

SEQ ID NO: 8448 - DNA, 331 bp, synthetic construct
  misc_feature 1..331: note = Synthetic construct
  source 1..331: mol_type = other DNA
cagtctgccctgactcagcctgcctccgtgtctgggtctcctggacagtcgatcaccatctcctgcactggaaccagcaatgattttgggacttataaccttgtctcctggtaccaacagcacccaggcagaacccccaaactcataatttatgagggcactcagcggccctcagggatttctgatcgcttctctggctccaagtctggcaacacggcctccctgacaatctctgggctccaggctgaggacgaggctgattatttctgctcctcatacgcaagtgggggcactgtggttttcggcggagggaccaagctgaccgtcctag

SEQ ID NO: 8449 - DNA, 322 bp, synthetic construct
  misc_feature 1..322: note = Synthetic construct
  source 1..322: mol_type = other DNA
gaaattgtgttgacacagtctccagccaccctgtctttgtctccaggggagagagccaccctctcatgcagggccagtcagagtgttagcagctatttagcctggtaccaacagaaacctggccagcctcccaggctcctcatctatggtgcatccaacagggccactggcatcccagccagattcggtggcagtgggtctgggacagacttcattctcaccatcagcagcctagagcctgaagattttgcagtgtattactgtcagcagggtaacaactggccgctcactttcggcggtgggaccaaggtggagatcaagc

SEQ ID NO: 8450 - DNA, 322 bp, synthetic construct
  misc_feature 1..322: note = Synthetic construct
  source 1..322: mol_type = other DNA
tccgatgaactgactcagccaccctcagtgtccgtgtccccagggcagacagccaccatcacctgctctggagatgaattgggggaaaaatttacttcttggtatcaacagaagccaggccagtcccctgtattggtcatctatcaagattccaagcgcccctcagggatccctgagcgaatctctggctccaactctgggaacacagccactctgaccatcaccggggcccaggctatggatgaggctgactattactgtcagacttgggacagcagcacttcttatctcttcggacctggcaccaaagtcaccgtcctgg

SEQ ID NO: 8451 - DNA, 343 bp, synthetic construct
  misc_feature 1..343: note = Synthetic construct
  source 1..343: mol_type = other DNA
gacatcgtgatgacccagtctcctgactccctggctgtgtctctgggcgagagggccaccatcaactgcaggtccagccagagtcttttatacagctccgacaatatgaactacttagcttggtatcagcagaaaccagggcagcctcctaaactcctcctttactgggcttctacccgggaatccggggtccctgaccgattcagtggcagcgggtctggagtgaatttcactctcaccatcagcagcctgcaggctacagatgtggcagtttattactgtcagcaatattatagtgctcctccctggacgttcggccaagggaccaaggtggagatcaaac

SEQ ID NO: 8452 - DNA, 331 bp, synthetic construct
  misc_feature 1..331: note = Synthetic construct
  source 1..331: mol_type = other DNA
cagtctgttttgactcagccaccctcagcgtctgggacccccggacagagggtcaccatctcttgttctggaagcagctccaacatcggagataatcctgtgaagtggtaccagcaggtcccaggaacggcgcccaaactcctcatttatagtactgatcagcggccctcaggggtccctgcccgattctctggctccaagtttggcacctcagcctccctggccatcagtgggctccggtctgcggatgaggctgtttatttctgtgcaacatgggatgacagtctgaatgctgtggttttcggcggagggaccaagttgaccgtcctgg

SEQ ID NO: 8453 - DNA, 337 bp, synthetic construct
  misc_feature 1..337: note = Synthetic construct
  source 1..337: mol_type = other DNA
cagtctgtattgacgcagccgccctcagtgtctgcggccccaggacagaaggtcaccatctcctgctctggaaacacctccaatattggcaatcattttgtttcgtggtaccaacacctcccaggaacagcccccaaactcgtcatctatgaaagttataagcgaccctcagggattcctgaccgattctctggctccaagtctggcacgtcagccaccctggaaatcagcggactccagcctggggacgaggccgattattattgcgaagcatgggagagcagcctgagtggtggccatggggtcttcggcggagggaccaagctgaccgtcctta

SEQ ID NO: 8454 - DNA, 322 bp, synthetic construct
  misc_feature 1..322: note = Synthetic construct
  source 1..322: mol_type = other DNA
gccatccagttgacccagtctccctcctccctgtctgcatctgtgggagacagagtcaccatcacttgccgggccagtcagggcattaatagttatctagcctggtatcaacaaggaccagggaaagcccctaagctcctgatctatgctgcatccactttgcaaagtggggtcccatcaaggttcagcggcagtggatctgggacagatttcactctcaccatcagcagcctgcagcctgaagatgttgcaacttattactgtcaacaacttaatacttaccctcggactttcggccctgggaccaaggtggatctcaaac

SEQ ID NO: 8455 - DNA, 322 bp, synthetic construct
  misc_feature 1..322: note = Synthetic construct
  source 1..322: mol_type = other DNA
gacatccagatgacccagtctccatcctccctgtctgcatctgtaggagacagagtcaccctcacttgccgggcaagtcagagcattagcggctatttaaattggtatcagcaaaaaccagggaaagcccctcagctcctgatctatgctgcatccagtttgcaaagtggggtcccgtcaaggttcagtggcagtggatctgggacagatttcactctcaccatcagcagtctgcaacctgaagattttgcaaccttctactgtcaacagagttacaagttccctcggacgttcggccaagggaccaaggtggagatcaaac

SEQ ID NO: 8456 - DNA, 334 bp, synthetic construct
  misc_feature 1..334: note = Synthetic construct
  source 1..334: mol_type = other DNA
cagtctgtgctgacgcagccgccctcagtgtctggggccccagggcagagggtcaccatctcctgcactgggagcagctccaacatcggggcaggttttgatgtacactggtatcagaaacttccaggagtagcccccaaactcctcatctatggtaacaccaatcggccctcaggggtccctgaccgattctctggctccaagtctggcacctcagcctccctggccatcactgggctccaggctgaggatgaggctgattattactgccagtcctatgacagcagcctgagtggtgtggttttcggcggagggaccaagctgaccgtcctac

SEQ ID NO: 8457 - DNA, 228 bp, synthetic construct
  misc_feature 1..228: note = Synthetic construct
  source 1..228: mol_type = other DNA
gggggttccagcagaagccaggccaggcccctgtgttggtgatatataaagacagtgagaggccctcagggatccctgagcgattctctggctccagctcagggacaacagtcacgttgaccatcagtggagtccaggcagaagacgaggctgactattactgtcaatcagcagacagcagtgattcttatagggtcttcggaactgggaccaaggtcaccgtcctag

SEQ ID NO: 8458 - DNA, 325 bp, synthetic construct
  misc_feature 1..325: note = Synthetic construct
  source 1..325: mol_type = other DNA
gatattgtgttgacgcagtctcccggcaccctgtctttgtctccaggggaaagagccaccctctcctgcagggccagtcaaagtgttagcagcaactacttagcctggtaccagcagaaacctggccaggctcccaggctcctcatctatagaacatccaccagggccactggcatctcagacaggttcagtggccgtgggtctgggacagacttcactctcaccatcagcagactggagcctgaagattttgcagtgtattactgtcagtactatggtggctcaccaaagacgttcggccaagggaccaaggtggaaatcaaac

SEQ ID NO: 8459 - DNA, 319 bp, synthetic construct
  misc_feature 1..319: note = Synthetic construct
  source 1..319: mol_type = other DNA
gacatccagatgacccagtctccttccaccctgtctgcttctgtaggagacagagtcaccatcacttgccgggccagtcagagtattaatactagggtggcctggtatcagcagaaaccagggaaagcccctaagctcctcatctatcaggcatctactttagaaactggggtcccatcgaggttcatcggcagtggatctgggacagagttcactctgaccatcagcagcctacagcctgatgattttgcaatttattactgccaacattattatagtcaaacaatgttcggccaagggaccaaggtggacatcaaac

SEQ ID NO: 8460 - DNA, 322 bp, synthetic construct
  misc_feature 1..322: note = Synthetic construct
  source 1..322: mol_type = other DNA
gacatccagatgacccagtctccatcctccctgtctgcatctgtaggagacagagtcaccatcgcttgccgggcaagtcagagcatatccacctatgtaaattggtatcagcagaaaccagggaaagcccctaacctcctgatctatgctgcatccagtttgcagagtggggtcccatcaaggttcagtggcagtggatctgggacagatttcactctcaccatcagcaatctgcaacctgaggactttgcaacttactactgtcaacagagtgacagtaccctgccctctttcggcggagggaccagggtggagatcaacc

SEQ ID NO: 8461 - DNA, 325 bp, synthetic construct
  misc_feature 1..325: note = Synthetic construct
  source 1..325: mol_type = other DNA
gaaattgtgttgacgcagtctccaggcaccctgtctttgtctccaggggaaagagccaccctctcctgcagggccagtcagactattatcagcaactatttagcctggtaccagcaaaaacctggccaggctcccaggctcctcatctttggtgcctccatcagggcctctggcatcccagacaggttcagtggcagtgggtctgggatcgacttcactctcaccatcaacagactggagcctgaggattttgcagtgtatcactgtcagcagtatggtagctcactctggacgttcggccaagggaccaaggtggaattgaaac

SEQ ID NO: 8462 - DNA, 334 bp, synthetic construct
  misc_feature 1..334: note = Synthetic construct
  source 1..334: mol_type = other DNA
cagtctgttctgacgcagccgccctcagtgtctggggccccagggcagagggtcaccatctcctgcattgggagcagctccaatatcggggcgagttctggtgttcactggtatcagcttcttccaggaacagcccccaaactcctcatctatcttaactccaaacggccctcaggggtccctgaccgattctctggctccaagtctggcacctcagcctccctggccatcactgggctccaggctgaggatgaggctgtttattactgccagtcccatgacaccagccttcctggttcggtgttcggcggagggacccagttgaccgtcctag

SEQ ID NO: 8463 - DNA, 322 bp, synthetic construct
  misc_feature 1..322: note = Synthetic construct
  source 1..322: mol_type = other DNA
gacatccagatgacccagtctccatcctccctgtctgcgtctgtaggagacacagtcaccatcacttgccgggcaagtcagaacataaccaaccatttaaattggtatcaacagagacctgggaaggcccctaaactcctgatctttgctggttatagtttgcaaaatggggtcccatcaaagttcagtggcagtggatctgggacagattttactctcaccatcagcggtctacaacctgaggattttgcgacttactactgtcaacagagtttcagttccgtttggacgttcggccaagggaccaaggtggaggtccaac

SEQ ID NO: 8464 - DNA, 322 bp, synthetic construct
  misc_feature 1..322: note = Synthetic construct
  source 1..322: mol_type = other DNA
gaagtagtgctgacgcagtctccagcctccctgtctctggctccaggggaaagagccaccctctcttgcagggccagtcagagtgtgagcagcaacttagcctggtaccagcaaaagggtggccaggctcccaggctcctcattcatgattcatcctccagggccgctgacatcccgtccaggttcagtggcagtgggtctgggacagaattcactctcaccatcagcagcctgcagtctgaagattctgcagtttactactgcctgcagtatgatcactggatttacacttttggccaggggaccaggctggagatcaaac

SEQ ID NO: 8465 - DNA, 337 bp, synthetic construct
  misc_feature 1..337: note = Synthetic construct
  source 1..337: mol_type = other DNA
gatgttgtgatgactcagtctccactctccctgcccgtcacccttggacagccggccttcatctcctgcaggtccagtcacgccctcgttcacagtgatggagacacttacttaaattggcttcaggagaggccaggccaatctccaaggcgccttatttatcaggtttttaagcgggacgctggggtcccagacagattcgacggcagtgggtcaggcactgacttcacactgaagatcaatagggtggaggctgaggatcttggaatttattactgcatgcaaggtacacattggcctccgggcttcggccaagggacacgactggagcttaatc

SEQ ID NO: 8466 - DNA, 290 bp, synthetic construct
  misc_feature 1..290: note = Synthetic construct
  source 1..290: mol_type = other DNA
ggggtctttgtctccaggggaaagggccaccctctcctgcagggccagtcagagtgttgacagctacttagcctggtaccaacagaaacctggccaggctcccaggctcctcatctatgatgtgtccaacagggccactggcatcccagcccggttcagtggcagtgggtctgggacagacttcactctcaccatcagtagcctagagtctgaagattttgcaatttactactgtcagcagcgtagcgactggctcactttcggcggagggaccaaggtggagatcaagc

SEQ ID NO: 8467 - DNA, 334 bp, synthetic construct
  misc_feature 1..334: note = Synthetic construct
  source 1..334: mol_type = other DNA
cagtctgtcctgactcagcctgcctccgtgtctgggtctcctggacagtcgatcaccatctcctgctctggatccagcgatgacgttggtgcttttgactatgtctcctggtaccaacaacaaccagggaaagcccccagactcttgatctttgaagtcagtaatcggccctcaggaatttctgatcgcttctctgcctccaagtctggcaatacggcctccctgaccatctctgggctccagattgaggacgagggggactatagttgctgctcatattcaagaggggacaccctgtatgtcttcgggtctgggaccacggtcgccgtcctcg

SEQ ID NO: 8468 - DNA, 325 bp, synthetic construct
  misc_feature 1..325: note = Synthetic construct
  source 1..325: mol_type = other DNA
tcctatgtcctgactcagccaccgtcggtgtcagtggccccaggacagacggccagactttcctgtgggggcgacaacattggatataaaagtgtacactggtatcagaagaggccaggccaggccccggtgctgctcgtctatgatgacaaacaccggccctcagggatccctgagcgattctctggctccaattctgactccacggccacccttagcatcagcagtgtcgaggccggggatgaggccgactattactgccaggtgtgggataacactgatgatcctgtggtattcggcggagggaccaagctgaccgtcctag

SEQ ID NO: 8469 - DNA, 340 bp, synthetic construct
  misc_feature 1..340: note = Synthetic construct
  source 1..340: mol_type = other DNA
gacatcgtgatgacccagtctccagaatttctggctgtgtctctgggcgagagggcctccatcaactgcaagtccagccagagtgttttaaacacctccaacaataagaactacctagcttggtatcagcagaaaccaggacagcgtcctaagttgctcatttattgggcatctactcgggagtccggggtccctgaccgattcagtggcagcgggtctgggacagatttcactctcaccatcagcagcctgcaggctgaggatgtggcagtttatttctgtcagcaatattataataagcctcccacttttggccaggggaccaagttggagatcaaac

SEQ ID NO: 8470 - DNA, 319 bp, synthetic construct
  misc_feature 1..319: note = Synthetic construct
  source 1..319: mol_type = other DNA
tcctatgagctgactcagccaccctcagtgtccgtgtccccaggacagacagccagcatcacctgctctggagataaattgggggataaatatgcttgctggtatcagcagaagccaggccagtcccctgtgctggtcatctatcaagatagcgagcggccctcagggatccctgagcgattctctggctccaactctgggaacacagccactctgaccatcagcgggacccaggctatggatgaggctgactattactgtcaggcgtgggacagcagcactgtgctattcggcggagggaccaagctgaccgtcctag

SEQ ID NO: 8471 - DNA, 325 bp, synthetic construct
  misc_feature 1..325: note = Synthetic construct
  source 1..325: mol_type = other DNA
gaaattgtgttgacgcagtctccaggcaccctgtctttgtctccaggggaaagagccaccctctcctgcagggccagtcagagtgtcgccggcggccacgtagcctggttccagtataatgttggccggcctcccaggctcctcatctatggagcaaccacccggcccactgacatcccagacaggttcagtggcagtgggtctgggacagacttcactctcaccatcagcagactggagcctgaagattttgcaacatattactgtcagcaatatactctctcgcctcacaattttggtcaggggaccaagctggagatcagac

SEQ ID NO: 8472 - DNA, 334 bp, synthetic construct
  misc_feature 1..334: note = Synthetic construct
  source 1..334: mol_type = other DNA
cagtctgtgctgacgcagccgccctcagtgtctggggccccagggcagagggtcaccatctcctgcactgggagcagctccaacatcggggcaggttatgatgtacactggtaccagcagcttccaggaacagcccccaaactcctcatctatggtaacaacaatcggccctcaggggtccctgaccgagtctctgagtccaagtctggcacctcagcctccctggccatcactgggctccaggctgaggatgaggctgattattattgccagtcctatgacagcagcctgagtggtcatgttttcggaactgggaccaaggtcaccgtcctag

SEQ ID NO: 8473 - DNA, 322 bp, synthetic construct
  misc_feature 1..322: note = Synthetic construct
  source 1..322: mol_type = other DNA
gacatccagatgacccagtctccatcctccctgtctgcatctataggagacagagtcaccatcacttgccgggcaagtcagagcattagcaactatttaaattggtatcagcagaaaccagggaaagcccctaagctcctgatctatgctgcatccagtttgcaaagtggggtcccatcaaggttcagtggcagtggatctgggacagatttcactctcaccatcagcagtctgcaacctgaagattttgcaacttactactgtcaacagagttacattaccccgtggacgttcggccaagggaccaaggtggagatcaaac

SEQ ID NO: 8474 - DNA, 331 bp, synthetic construct
  misc_feature 1..331: note = Synthetic construct
  source 1..331: mol_type = other DNA
cagtctgccctgactcagcctcgctcagtgtccgggtctcctggacagtcagtcaccatctcctgcactggaaccagcagtgatgttggtggttataactatgtctcctggtaccaacagcacccaggcaaagcccccaaactcatgatttatgatgtcagtaagcggccctcaggggtccctgatcgcttctctggctccaagtctggcaacacggcctccctgaccatctctgggctccaggctgaggatgaggctgattattactgctgctcatatgcaggcagctacactttggtgttcggcggagggaccaagctgaccgtcctag

SEQ ID NO: 8475 - DNA, 322 bp, synthetic construct
  misc_feature 1..322: note = Synthetic construct
  source 1..322: mol_type = other DNA
gacatccagatgacccagtctccatcctccctgtctgcatctgtaggagacagagtcaccatcacttgccgggcaagtcagagcattagcagctatttaaattggtatcagcagaaaccagggaaagcccctaagctcctgatctatgctgcatccagtttgcaaagtggggtcccatcaagattcagtggcagtggatctgggacagatttcactctcaccatcagcagtctgcaacctgaagattttgcaacttactactgtcaacagagttacagtacccctcggacttttggccaggggaccaagctggagatcaaac

SEQ ID NO: 8476 - DNA, 328 bp, synthetic construct
  misc_feature 1..328: note = Synthetic construct
  source 1..328: mol_type = other DNA
tcctatgtactgactcagccaccctcagtgtccgcggccccaggaaagacggccaggattacctgtgggggaaacaacattggaggtatacgtgtccactggtaccagcagaagccaggccaggcccctgtgttggtcgtctatgatgatagcgaccggccctcagggatccctgagcgattctctggctccaactctgggaacacggccaccctgaccatcagcagggtcgaagccggggatgaggccgactattactgtcaggtgtgggataatagtagtgatcatcctttagtattcggcggagggaccaggctgaccgtcctag

SEQ ID NO: 8477 - DNA, 325 bp, synthetic construct
  misc_feature 1..325: note = Synthetic construct
  source 1..325: mol_type = other DNA
gccatccagatgacccagtctccatcctccctgtctgcatctgtaggagacagagtcaccatcacttgccgggcaagtcagggcattagaaatgatttaggctggtatcagcagaaaccagggacagcccctaagctcctgatctatgctgcatccagtttacaaagtggggtcccatcaaggttcagcggcagtggatctggcacagaattcactctcaccatcagcagcctgcagcctgaagattttgcaacttattactgtcttcaggattccaattacccttttgtcacttttggccaggggaccaagctggagatcaaac

SEQ ID NO: 8478 - DNA, 322 bp, synthetic construct
  misc_feature 1..322: note = Synthetic construct
  source 1..322: mol_type = other DNA
gccatccggatgacccagtctccatcctcactctctgcatctacaggagacagagtcaccgtcacttgtcgcgcgagtcagggtattagtagttatttagcctggtatcagctaaaaccagggaaagcccctaagctcctgatctatgctacatccactttgcaaagtggggtcccatcaaggttcagtggcagtggatctgggacagatttcactctcaccatcagctgcctgcagtctgaagattttgcaacttattactgtcaacagtattatagttacccgtacacttttggccaggggaccaagctggggatcaaac

SEQ ID NO: 8479 - DNA, 322 bp, synthetic construct
  misc_feature 1..322: note = Synthetic construct
  source 1..322: mol_type = other DNA
gacatccaaatgacccagtctccatcctccctgtctgcatctgtaggagacagagtcaccatcacttgccgggcaagtcagagcattagtgacaatttaaattggtatcagcacaaaccagggaaagcccctaagttcctgatttatgctgcatccagtttgcaaagtggggtcccatcaaggttcagtggcagtggatctgggacagatttcactctcaccatcagcagtctgcaacctgaagattttgcaacttacttctgtcaacagagtttcactacccctcccacttttggccaggggaccaagctggagatcagag

SEQ ID NO: 8480 - DNA, 322 bp, synthetic construct
  misc_feature 1..322: note = Synthetic construct
  source 1..322: mol_type = other DNA
gaaatagtgatgacgcagtctccagccaccctgtttgtgtctccagggcaaagagtcaccctctcctgcagggccagtcagagaattgacaataaattagcctggtaccaactgaaacctggccaggctcccaggctcctcatctatggtgcgtccaacacggccactggtttcccagccaggttcagtggcagtgggtctgggacagagttcactctcaccatcagcagcctgcagtctgaagattttgccgtttattactgtcagcaatatgatacgtggcctcggacttttggccaggggaccaagctggagatcaaac

SEQ ID NO: 8481 - DNA, 334 bp, synthetic construct
  misc_feature 1..334: note = Synthetic construct
  source 1..334: mol_type = other DNA
cagtctgccctgactcagtctgcctccgtgtctgggtctcctggacagtcgatcaccatctcctgcactggaaccagcagtgatgttgggaattataaccttgtctcctggtaccaacaacacccaggcaaagcccccaaactcatgatttatgaggtcaataagcggccctcaggggtttctaatcgcttctctggctccaagtctggcaacacggcctccctgacaatctctgggctccaggctgaggacgaggctgattattactgctgctcatatgcaggcaggaactcggggaatgtcttcggaactggcaccaaggtcaccgtcctgc

SEQ ID NO: 8482 - DNA, 325 bp, synthetic construct
  misc_feature 1..325: note = Synthetic construct
  source 1..325: mol_type = other DNA
tcctatgagctgactcagccacactcagtgtcagtggccacagcacagatggccaagatcacctgtgggggaaacaatattggaactaaagctgtgcactggtgccagcaaacgccaggccaggaccctctgctggtcatctatagcgataacaaccggccctcagggatccctgagcgattctctggctccaacccagggaataccgccaccctaaccatcagcaggatcgaggctgggggtgagactgactattactgtcaggtgtgggacagtagtagtgatcatccggtattcggcggagggaccaagctgaccgtcctag

SEQ ID NO: 8483 - DNA, 322 bp, synthetic construct
  misc_feature 1..322: note = Synthetic construct
  source 1..322: mol_type = other DNA
gacatccagatgacccagtctccatcctccctgtctgcatctgtaggagacagagtcaccatcacttgccgggcgagtcagggcattagcaattctttagcctggtatcagcagaaaccagggaaagcccctaagctcctgctctatagtgcatccagagtggaaagtggggtcccatccaggttcagtggcagtggatctgggacggattacactctcaccatcagcagcctgcagcctgaagattttgcaacttattactgtcaacagtattatagttccccgtacacttttggccaggggaccaagctggagatcaaac

SEQ ID NO: 8484 - DNA, 212 bp, synthetic construct
  misc_feature 1..212: note = Synthetic construct
  source 1..212: mol_type = other DNA
cccaggcaaagcccccaaactcatgatttatgatgtcagtaatcggccctcagggatttctaatcgcttctctggctccaagtctggcaacacggcctccctgaccatctctgggctccaggctgacgacgaggctgattattactgcacctcatatacaaacgacagcaattctcaggtcttcggcggagggaccaagctgaccgtcctag

SEQ ID NO: 8485 - DNA, 325 bp, synthetic construct
  misc_feature 1..325: note = Synthetic construct
  source 1..325: mol_type = other DNA
tcctatgtgttgactcagccaccctcagtgtcagtggccccaggaaagacggccaggattccctgtgggggacagaatattgaaagtaagagtgtgcactggtaccgacagaagccaggccaggcccctgttttggtcgtctatgatgatcgcgaccggccctcagggatccctgcgcgaatctctggctccaactctggaaacatggccaccctgaccatcagcggggtcgaagccggggatgaggccgactattattgtcaggtgtgggaccattctaatgatcattttgtcttcggaggtgggaccaagatcaccgtcgtag

SEQ ID NO: 8486 - DNA, 334 bp, synthetic construct
  misc_feature 1..334: note = Synthetic construct
  source 1..334: mol_type = other DNA
cagtctgtgttgacgcagccgccctcagtgtctggggccccagggcagagggtcaccctctcctgcactgggagcagctccaacatcggggcaggttatgatgtacactggtaccagcaacttccaggaacagcccccaaactcctcatctatcttaacagcaatcgaccctcaggggtccctgaccgattctctggctccaagtctggcacctcagcctccctggccatcactgggctccaggctgaggatgaggctgattattactgccagtcctttgacagcagcctgagtggttttgtcttcggaactgggaccaaggtcaccgtcctag

SEQ ID NO: 8487 - DNA, 331 bp, synthetic construct
  misc_feature 1..331: note = Synthetic construct
  source 1..331: mol_type = other DNA
cagtctgtgttgacgcagccgccctcagtgtctgcggccccaggacagaaggtcaccatctcctgctctggaagcagctccaacattgggaaaaattctgtctcctggtaccagcaactcccaggaacagcccccagactcctcatctatgaaaataatatgcgaccctcactgattcctgaccgattctctgcctctaagtccggcacgtcagccaccctggacatcaccggactccagactggggacgaggccgattattactgcggaacatgggatagcagcctgactgctggggtcttcggcggcgggaccaaggtgaccgtcctag

SEQ ID NO: 8488 - DNA, 325 bp, synthetic construct
  misc_feature 1..325: note = Synthetic construct
  source 1..325: mol_type = other DNA
gaaattgtgttgacgcagtctccaggcaccctgtctttgtctccaggggaaagagccaccctctcctgcagggccagtcagagtgttagcagcagctacttagcctggtaccagcagaaacctggccaggctcccaggctcctcatctatggtgcatccagcagggccactggcatcccagacaggttcagtggcagtgggtctgggaccgacttcactctcaccatcagcagactggagcctgaagattttgcagtgtattactgtcagcagtatggttcctctttattcactttcggccctgggaccaaagtggatatcagac

SEQ ID NO: 8489 - DNA, 322 bp, synthetic construct
  misc_feature 1..322: note = Synthetic construct
  source 1..322: mol_type = other DNA
gacatccagatgacccagtctccatcctccctgtctgcatctgtaggagacagagtcaccatcacttgccgggcaagtcagagcattagcagctatttaaattggtatcagcagaaaccagggaaagcccctaagctcctgatctatgctgcatccagtttgcaaagtggggtcccatcaaggttcagtggcagtggatctgggacagatttcactctcaccatcagcagtctgcaacctgaagattttgcaacttactactgtcaacagagttacagtacccctccgacgttcggccaagggaccaaggtggaaatcaaac

SEQ ID NO: 8490 - DNA, 337 bp, synthetic construct
  misc_feature 1..337: note = Synthetic construct
  source 1..337: mol_type = other DNA
gatattgtgatgacccagactccactctctctgtccgtcacccctggacagccggcctccatctcctgcaagtctagtcagagcctcctgcatagtgatggaaagacctatttgtattggtacctgcagaagccaggccagtctccacagctcctaatctatgaagtttccagccggttctctggagtgccagataggttcagtggcagcgggtcagggacagatttcacactgaaaatcagccgggtggaggctgaggatgttggggtttattactgcatgcaaggtatacaccttccgtggacgttcggccaagggaccaaggtggaaatcaaac

SEQ ID NO: 8491 - DNA, 331 bp, synthetic construct
  misc_feature 1..331: note = Synthetic construct
  source 1..331: mol_type = other DNA
cagtctgtgctgactcagccaccctcagcgtctgggacccccgggctgagggtcaccatctcttgttctggaagcacctccaacatcggaagtaatactgtaaactggtaccagcagctcccaggaacggcccccaaactcctcatctatagtagtaatcagcggccctcaggggtccctgaccgattctctggctccaagtctggcacctcagcctccctggccatcagtgggctccagtctgaggatgaggctgattattactgtgcagcatgggatgacagcctgaatggttatgtcttcggaactgggaccaaggtcaccgtcctag

SEQ ID NO: 8492 - DNA, 325 bp, synthetic construct
  misc_feature 1..325: note = Synthetic construct
  source 1..325: mol_type = other DNA
tcctatgtgctgactcagccaccctcggtgtcagtggccccaggacagacggccaggattacctgtgggggaaacaacattggaagtaaaagtgtgcactggtaccagcagaagccaggccaggcccctgtgctggtcgtctatgatgatagcgaccggccctcagggatccctgagcgattctctggctccaactctgggaacacggccaccctgaccatcagcagggtcgaagccggggatgaggccgactattactgtcaggtgtgggatagtagtagtgatcattgggtgttcggcggagggaccaagctgaccgtcctag

SEQ ID NO: 8493 - DNA, 328 bp, synthetic construct
  misc_feature 1..328: note = Synthetic construct
  source 1..328: mol_type = other DNA
gaaatagtgatgacgcagtctccagccaccctgtctgtgtctccaggggaaagagccaccctctcctgcagggccagtcagagtgttagcagcaacttagcctggtatcagcagaagcctggccaggctcccagactcctcatctatggtgcttccaccagggccactggtatcccagccaggttcagtggcagtgggtctgggacagagttcactctcaccatcagcggcctgcagtctgaagattttgcagtttatttctgtcagcagtataataactggcctcccaaatacacttttggccaggggaccaagctggagatcaaac

SEQ ID NO: 8494 - DNA, 334 bp, synthetic construct
  misc_feature 1..334: note = Synthetic construct
  source 1..334: mol_type = other DNA
cagtctgccctgactcagcctgcctccgtgtctgggtctcctggacagtcgatcaccatctcctgcactggaaccagcagtgatgttggaagttataaccttgtctcctggtaccaacagcacccaggcaaagcccccaaactcatgatttctgaggtcagtaagcggccctcaggggtttctaatcgcttctctggctccaagtctggcaacacggcctccctgacaatctctggactccaggctgaggacgaggctgattattactgctgctcatatgcaggtagtagcactttcgtgctattcggcggagggaccaaactgaccgtcctag

SEQ ID NO: 8495 - DNA, 331 bp, synthetic construct
  misc_feature 1..331: note = Synthetic construct
  source 1..331: mol_type = other DNA
cagtctgccctgactcagcctgcctccgtgtctgggtctcctggacagtcggtcaccatctcctgcactggaaccagcagtgacgttggtggttataactctgtctcctggtaccagcaacacccaggcaaagcccccaaactcatgatttatgaggtccgtaatcggcccttaggggtttctaatcgcttctctggctccaagtctggcaacacggcctccctgaccatctctgggctccggactgaggacgaggctgattattattgctgttcatattcaggcaggaacaacgatgtcttcggaactgggaccaaggtcaccgtcctgg

SEQ ID NO: 8496 - DNA, 331 bp, synthetic construct
  misc_feature 1..331: note = Synthetic construct
  source 1..331: mol_type = other DNA
cagtctgtgctgactcagccaccctcagcgtctggggcccccgggcagagggtcatcgtttcttgttctggcagcagctccaacatcggaattaatactgtgaactggtaccagcaactcccaggaacggcccccaaactcgtcgtctataggaataatcagcggccctcaggggtccctgcccgattctctggctccaagtctggcgcgtccgcctccctgaccatcagtgggctccaggctgaggatgaggctgattattattgtgcagcatgggatgacagcctgaatactaatgtcttcggacctgggaccagggtctccgtcctag

SEQ ID NO: 8497 - DNA, 322 bp, synthetic construct
  misc_feature 1..322: note = Synthetic construct
  source 1..322: mol_type = other DNA
gacatccagatgacccagtctccatcctccctgtctgcatctgtgggagacagagtcaccatcacctgccggacaagtcagagcattagcagttctttaaattggtatcagcagacaccagggaaagcccctaaactcctgatctacggtgcatccagtttgcaaagtggggtcccttcaaggttccgtggcagtggctctgggacagatttcactctcaccattaccagtctccaacctgaagattttgcaacttactactgtcagtggagttccagtgtcttggtgacgttcggccaagggaccaaggttgagatcaaac

SEQ ID NO: 8498 - DNA, 97 bp, synthetic construct
  misc_feature 1..97: note = Synthetic construct
  source 1..97: mol_type = other DNA
ctccaggctgacgacgaggctgattattactgcacctcatatacaaacgacaccaattctcaggtattcggcggagggaccaagctgaccgtcctag

SEQ ID NO: 8499 - DNA, 322 bp, synthetic construct
  misc_feature 1..322: note = Synthetic construct
  source 1..322: mol_type = other DNA
tcctttgagttgacacagccaccctcggtgtcagtgtctccaggacagacggccaggatcacctgctctggagatgaattgccaaagcaatatagttattggtaccagcagaaggcaggccaggcccctcttctggtaatgtataaagacagtgagaggccctcagggatccctgagcgattctctggctccagctcagggacaacagtcacgttgaccatcagcggagtccaggcagaagacgaggctgactatttctgtcagtcagcagacagcagtggcacttgggtgttcggcggagggaccaagctgaccgtccttg

SEQ ID NO: 8500 - DNA, 319 bp, synthetic construct
  misc_feature 1..319: note = Synthetic construct
  source 1..319: mol_type = other DNA
gaaattgtgttgacacagtctccagccaccctgtctttgtctccaggggaaagagccaccctctcctgcagggccagtcagagtgttagtagtctcttagcctggttccaacaaaaacctggccaggctcccaggctcctcatctatgatgcatccaacagggccactggcatcccagccaggttcagtggcagtgggtctgggacagacttcactctcaccatcagcagtctagagcctgaagattttgcagtttattactgtcaacagcgtagcaactggtggacgttcggccaggggaccaaggtggaaatcaaac

SEQ ID NO: 8501 - DNA, 331 bp, synthetic construct
  misc_feature 1..331: note = Synthetic construct
  source 1..331: mol_type = other DNA
cagtctgccctgactcagcctgcctccgtgtctgggtctcctgggcagtcgatcaccatttcctgcaatggatccagcggtgacgttggtggttttaactttgtctcctggtaccagcaataccctggcaaaacccccaaactcataatttatgaagtccataatcggccctcaggggtttctcatcgcttctctggctccaagtctggaaacacggcctccctgaccatctctggactccaggctgaggacgaggctgattatttctgcacctcatatacaggcatctctctctatgtcttcggaacaggaaccacggtcaccgtcctac

SEQ ID NO: 8502 - DNA, 319 bp, synthetic construct
  misc_feature 1..319: note = Synthetic construct
  source 1..319: mol_type = other DNA
gacatccagatgacccagtctccttccaccctgtctgcatctgtaggagacagagtcaccatcacttgccgggccagtcagagtattagtaactggttggcctggtatcagcagaaaccagggaaagcccccaagctcctgatctataaggcgtctactttagaaagtggggtcccatcgaggttcagcggcagtggatctgggacagaattcactctcaccatcagcagcctgcagcctgatgattttgcaacttattactgccagcaatatagtggttattggacgttcggccaagggaccaaggtggaaatcaaac

SEQ ID NO: 8503 - DNA, 319 bp, synthetic construct
  misc_feature 1..319: note = Synthetic construct
  source 1..319: mol_type = other DNA
gaaattgtgttgacgcagtctccaggcaccctgtctttgtctccaggggaaagagccaccctctcctgcagggccagtcagaatgtaagaagctacttggcctggtaccagcagaagcctggccaggctcccaggctcctcatctatgctgcatccaacagggccactgacatcccagacaggttcagtggcagtgggtctgggacagacttcactctcaccatcagcagactggagcctgaagattttgcagtgtatttctgtcagcaatatgatacctcagggacgttcggccaagggaccaaggtggaggtcaaac

SEQ ID NO: 8504 - DNA, 319 bp, synthetic construct
  misc_feature 1..319: note = Synthetic construct
  source 1..319: mol_type = other DNA
tcccatgagctgacacagccaccctcggtgtcagtttccccaggagagacggccaagatcacctgctctggagatggattgccaaagcaatatgctttttggtaccagcagaagacaggccaggcccctcttttattactatataaagacaaagagaggcccccagggatccctgagcgattctctggctccagctctgggacaacagtcacattgaccatcagtggagtccaggcagaagacgaggctgactactactgtcaatcagcaaacagcagtgcctccgtcttcgggactgggaccaaggtcaccgtcctag

SEQ ID NO: 8505 - DNA, 325 bp, synthetic construct
  misc_feature 1..325: note = Synthetic construct
  source 1..325: mol_type = other DNA
gaaattgtgttgacgcagtctccaggcaccctgtctttgtctccaggggaaagagccaccctctcctgcagggccagtcagagggttgacaggaagtacttagcctggtaccagcagaaacctggccaggctcccagcctcctcatctatagtgcatccagcagggccagtggcgtcccagacaggttcggtggcagtgggtctgggacagacttcactctcagcatcagcagactggagcctgaagattatgcagtgtattactgtcagctctatgataactcccggtacacttttggccaggggaccaagctggacatcaagc

SEQ ID NO: 8506 - DNA, 325 bp, synthetic construct
  misc_feature 1..325: note = Synthetic construct
  source 1..325: mol_type = other DNA
gccatccagttgacccagtctccatccttcctgtctgcatctgtaggagacagagtcaccatcacttgccgggccagtcgggccattgacaattatttagcctggtatcagcaaaaaccaggggaagcccctaaactcctgctctatgctgtatccactttgcagagtggggtcccatcaaggttcagcggcagtggatctgggacagaattcactctcacgatcagcagcctgcagcctgaagactatgcaacttattactgtcaacagcttagttcttaccctccgatcaccttcggccaagggacacgactggagattaaac

SEQ ID NO: 8507 - DNA, 331 bp, synthetic construct
  misc_feature 1..331: note = Synthetic construct
  source 1..331: mol_type = other DNA
cagtctgtgttgacgcagccgccctcagtgtctgcggccccaggacagaaggtcaccatgtcctgctctggaaggaactccaacattgggaataattatgtttcctggtaccagcaggtcccaggaacagcccccaaactcctcatctatgagaataataagcgaccctcagggattcctgaccgattctctggctccaagtctggcacgtcagccaccctgggcatcagcggactccagactggggacgaggccgattattactgcggaacatgggataccagcctgagtggtgtggttttcggcggcgggaccaagttgaccgtcctgg

SEQ ID NO: 8508 - DNA, 322 bp, synthetic construct
  misc_feature 1..322: note = Synthetic construct
  source 1..322: mol_type = other DNA
gacatccagatgacccagtctccatctttcctgtctgcatctgtgggggacagagtcaccatcacttgccgggcaagtcagggcattgaaaatgatttaggctggtttcagcagaaaccagggaaagcccctaagcgcctgatctatgcagcatccaccttacagcgtggagtcccatcacggttcagcggcagtgcatctgggacagacttcactctcacaatcagcagcctgcagcctgaagattttgcaacttattattgtctacagtataataattaccctcgcacgttcggccaggggaccaaggtggaagtcagac

SEQ ID NO: 8509 - DNA, 334 bp, synthetic construct
  misc_feature 1..334: note = Synthetic construct
  source 1..334: mol_type = other DNA
cagtctgccctgactcagcctgcctccgtgtctgggtctcctggacagtcgatcaccctctcctgcactgggaccagaagtgatattgggacttataaccttgtctcctggtaccaacagcacccaggcaaagcccccaaactcttaatttatgcgggcagacagcggccctcaggggtttctaatcgcttctctggctccaagtctggcaacacggcctccctgacaatctctgggctccaggctgaggacgaggctgattattactgctgttcatatgcaggtagtagccctaattatgtcttcggaactgggaccaaggtcaccgtcctag

SEQ ID NO: 8510 - DNA, 325 bp, synthetic construct; identical to SEQ ID NO: 1834
  misc_feature 1..325: note = Synthetic construct
  source 1..325: mol_type = other DNA

SEQ ID NO: 8511 - DNA, 325 bp, synthetic construct
  misc_feature 1..325: note = Synthetic construct
  source 1..325: mol_type = other DNA
tcctatgttgtgactcagccaccctcggtgtcggtggccccaggacagacggccatgattccctgtggggcatacaatattggaggtaaaactgtgcattggtaccaactgaagccaggccaggcccctgtgctggtcgtccatgatgataaacaccggccctctgggatccctgaccgattctctggctccaactctgacaacgcggccaccctgaccgtcaacagggtcgaagccggggatgaggccgactattattgtcacctgtgggatagtagtagtggtcgctgggtgtttggcggagggaccaagttgaccgtcctag

SEQ ID NO: 8512 - DNA, 328 bp, synthetic construct
  misc_feature 1..328: note = Synthetic construct
  source 1..328: mol_type = other DNA
gagattgttttgacgcagtctccaggcaccctgtctttgtctccaggggaacgagccaccctctcttgcacggccagtcagtatttttccagcaactacttagcctggtaccagcacaaacctggccaacctccccggctcctcatttatggtgtctccagtcgggccacgggcatcccagacaggttccttggcagtgggtctgggacagacttcactctcaccatcagcagactggagcctgaagattttgcagtgtattactgtcagcactatggagactcagcggcgtacacttttggccaggggaccaagctggagatcaaac

SEQ ID NO: 8513 - DNA, 322 bp, synthetic construct
  misc_feature 1..322: note = Synthetic construct
  source 1..322: mol_type = other DNA
gacatccagatgacccagtctccctcttccctgtctgcatctgtgggagacagagtcaccatcacttgccgggcgagtgagaacattagaaactggttagcctggtatcaacagagaccagggaaagcccctaaactcctgatctatgctgcgtccaggttgcaaagtggggtcccatcaaggttcagcggcagtggatctgggacagatttcactctcaccatcagcagcctgcagcctgacgattttgcaaattactattgtcaacaggctgacactttcccattcaatttcggccctgggaccaaagtggatatcaacc

SEQ ID NO: 8514 - DNA, 325 bp, synthetic construct
  misc_feature 1..325: note = Synthetic construct
  source 1..325: mol_type = other DNA
gagattgtgttgactcagtctccaggcaccctgtctttgtctccaggggaaacagccaccctctcctgcagggccagtcagagtcttagcagcgacttcctagcctggtaccagcagaaacctggccaggctcccaggctcctcatgtatggtacatccagtagggccactggcatctcagacaggttcagtggcagtgggtctgggacagacttcactctcaccatcagcagactggagcctgaggattttgcagtgtattactgtcagcagtatgctagttcacctcggacgttcggccaagggaccaaggtggaaatcaaac

SEQ ID NO: 8515 - DNA, 322 bp, synthetic construct
  misc_feature 1..322: note = Synthetic construct
  source 1..322: mol_type = other DNA
gaaattgtgttgacgcagtctccaggcaccctgtctttgtctccaggggaaagagccaccctctcctgcagggccagtcagagtgttagcgagaccaatttagcctggtaccagcagaaacctggccaggctcccaggctcctcatctatggtgcatccagcagggccactggcatcccagacaggttcagtggcagtgggtccgggacagacttcattctctccatcagcagactggagcctgaagattttgcagtgtattactgtcaacaatatggtagtacactcactttcggcggagggaccaaggtggagatcaagc

SEQ ID NO: 8516 - DNA, 328 bp, synthetic construct
  misc_feature 1..328: note = Synthetic construct
  source 1..328: mol_type = other DNA
tcctctgtgctgactcagccaccctcggtgtcagtgccccccggacagacggccaggattacctgtgggggaagcaccattggaggtgccactgtgcactggtaccagcagaagccaggccaggccccagtgctggtcgtctatgatgatagcgaccggccctcagacatccctgagcgattctcgggctccaactctgggaacacggccaccctgaccatcagcagggtcgaggccggggatgaggccgactattactgtcaggtgtgggatagtagttctgctcatgtttatgtcttcggacctgggacgaagctcaccgtcctag

SEQ ID NO: 8517 - DNA, 334 bp, synthetic construct
  misc_feature 1..334: note = Synthetic construct
  source 1..334: mol_type = other DNA
cagtctgccctgactcaacctgcctccgtgtctgggtctcctgaacagtcgatcaccatcgcctgcaccggaagcagcaatgatattgggagttataatcttgtgtcctggttccaacagaagccagacaaagcccccagactcataatttatgaggtccgtaagcggccctcaggggtttctaatcgcttctctggctccaagtctgacaacacggccttcctgacaatctctgaaatacaggctgaggacgaggctgaatattattgctgctcatatgcaggtagcagtcttcattatgtcttcggaactgggaccaaggtcaccgtcatgg

SEQ ID NO: 8518 - DNA, 331 bp, synthetic construct
  misc_feature 1..331: note = Synthetic construct
  source 1..331: mol_type = other DNA
cagtctgtgctgacgcagccgccctcagtgtctggggccccagggcagaaggtcaccatctcctgcactgggagcagctccaacatcggggcaggttatgatgtacactggtaccagcagcgtccaggaacagtccccaaactcctcatctatggtaacaacaatcggccctcaggggtccctgaccgattctctggctccaagtctgacgcctcagcctccctggtcatcactgggctccaggctgaggatgaggctgattatttctgccagtcctatgacaccagcctgagtggtgtcttcggaactggaaccaaggtcaccgtcctag

SEQ ID NO: 8519 - DNA, 319 bp, synthetic construct
  misc_feature 1..319: note = Synthetic construct
  source 1..319: mol_type = other DNA
aacgtccagatgacccagtctccttccaccctgtctgcatctgtaggagacagagtcaccatcacttgccgggccagtcagagtattagtacctggttggcctggtatcagcagaaaccagggaaagcccctaagctcctgatctatagggcatctaatttagaaactgggatcccatcaaggttcagcggcagtggatctgggacagacttcactctcaccatcagcagcctgcagcctgatgattttgcaacttattactgccaacaatataatagttattgcagttttggccaggggaccaggttggagatcaaac

SEQ ID NO: 8520 - DNA, 36 bp, synthetic construct
  misc_feature 1..36: note = Synthetic construct
  source 1..36: mol_type = other DNA
tgtcagcagtatggtaggtcaccccagatcaccttc

SEQ ID NO: 8521 - DNA, 33 bp, synthetic construct
  misc_feature 1..33: note = Synthetic construct
  source 1..33: mol_type = other DNA
tgccaacaatataagagtttttcttatactttt

SEQ ID NO: 8522 - DNA, 39 bp, synthetic construct
  misc_feature 1..39: note = Synthetic construct
  source 1..39: mol_type = other DNA
tgcagctcatacagaagcagcaggattctttatgtcttc

SEQ ID NO: 8523 - DNA, 33 bp, synthetic construct
  misc_feature 1..33: note = Synthetic construct
  source 1..33: mol_type = other DNA
tgtcagcaatatcatatgacccctccgacgttc

SEQ ID NO: 8524 - DNA, 30 bp, synthetic construct
  misc_feature 1..30: note = Synthetic construct
  source 1..30: mol_type = other DNA
tgtcagcagtttggcagctcacccactttc

SEQ ID NO: 8525 - DNA, 39 bp, synthetic construct
  misc_feature 1..39: note = Synthetic construct
  source 1..39: mol_type = other DNA
tgtcagcattatggtacctcacctccgatgtacaccttt

SEQ ID NO: 8526 - DNA, 33 bp, synthetic construct
  misc_feature 1..33: note = Synthetic construct
  source 1..33: mol_type = other DNA
tgcttgctctcccatagtggtgcttgggtgttc

SEQ ID NO: 8527 - DNA, 36 bp, synthetic construct
  misc_feature 1..36: note = Synthetic construct
  source 1..36: mol_type = other DNA
tgttcctcatatgcaggctcttacacttgggtgttc

SEQ ID NO: 8528 - DNA, 33 bp, synthetic construct
  misc_feature 1..33: note = Synthetic construct
  source 1..33: mol_type = other DNA
tgtcagcagtatgatggctcacctcagacgttc

SEQ ID NO: 8529 - DNA, 33 bp, synthetic construct
  misc_feature 1..33: note = Synthetic construct
  source 1..33: mol_type = other DNA
tgccaacagtatgatagttttccatacactttt

SEQ ID NO: 8530 - DNA, 42 bp, synthetic construct
  misc_feature 1..42: note = Synthetic construct
  source 1..42: mol_type = other DNA
tgcagctcatatacaaacaacaacactcctcgttgggtgttc

SEQ ID NO: 8531 - DNA, 33 bp, synthetic construct
  misc_feature 1..33: note = Synthetic construct
  source 1..33: mol_type = other DNA
tgtcagcaatattttgttcctcccctcactttc

SEQ ID NO: 8532 - DNA, 39 bp, synthetic construct
  misc_feature 1..39: note = Synthetic construct
  source 1..39: mol_type = other DNA
tgtcaatcaacagacagtagtggtgattattggctgttc

SEQ ID NO: 8533 - DNA, 39 bp, synthetic construct
  misc_feature 1..39: note = Synthetic construct
  source 1..39: mol_type = other DNA
tgcacctcatatacaaacaacagcaattctcaggtattc

SEQ ID NO: 8534 - DNA, 30 bp, synthetic construct
  misc_feature 1..30: note = Synthetic construct
  source 1..30: mol_type = other DNA
tgtcagcagcgcagcaactggatcaccttc

SEQ ID NO: 8535 - DNA, 33 bp, synthetic construct
  misc_feature 1..33: note = Synthetic construct
  source 1..33: mol_type = other DNA
tgtcagcaatattatagtactcctcccacgttc

SEQ ID NO: 8536 - DNA, 33 bp, synthetic construct
  misc_feature 1..33: note = Synthetic construct
  source 1..33: mol_type = other DNA
tgtcagcagtatggtccctcactttgcaccttc

SEQ ID NO: 8537 - DNA, 39 bp, synthetic construct
  misc_feature 1..39: note = Synthetic construct
  source 1..39: mol_type = other DNA
tgcacctcatatacaaacaacagcaattctcagatattc

SEQ ID NO: 8538 - DNA, 33 bp, synthetic construct
  misc_feature 1..33: note = Synthetic construct
  source 1..33: mol_type = other DNA
tgtcagcaatattatagtgctcctttcactttc

SEQ ID NO: 8539 - DNA, 39 bp, synthetic construct
  misc_feature 1..39: note = Synthetic construct
  source 1..39: mol_type = other DNA
tgccagtcctatgacagcaggctgactacttgggtgttc

SEQ ID NO: 8540 - DNA, 36 bp, synthetic construct
  misc_feature 1..36: note = Synthetic construct
  source 1..36: mol_type = other DNA
tgcagctcatatgcaggcaacaacaattatctcttc

SEQ ID NO: 8541 - DNA, 33 bp, synthetic construct
  misc_feature 1..33: note = Synthetic construct
  source 1..33: mol_type = other DNA
tgtcagcaatattatacttctacgtggacgttc

SEQ ID NO: 8542 - DNA, 39 bp, synthetic construct
  misc_feature 1..39: note = Synthetic construct
  source 1..39: mol_type = other DNA
tgtaattcccgcgacagcagtggtgaccgttatgtcttc

SEQ ID NO: 8543 - DNA, 36 bp, synthetic construct
  misc_feature 1..36: note = Synthetic construct
  source 1..36: mol_type = other DNA
tgtcactcttatgatagcgccaatccagggatattc

SEQ ID NO: 8544 - DNA, 33 bp, synthetic construct
  misc_feature 1..33: note = Synthetic construct
  source 1..33: mol_type = other DNA
tgtctacaacattattctactcctcagactttt

SEQ ID NO: 8545 - DNA, 33 bp, synthetic construct
  misc_feature 1..33: note = Synthetic construct
  source 1..33: mol_type = other DNA
tgccatcagagtagtgccttaattcaaactttt

SEQ ID NO: 8546 - DNA, 33 bp, synthetic construct
  misc_feature 1..33: note = Synthetic construct
  source 1..33: mol_type = other DNA
tgtcagcactatggtagctcattgtggacgttc

SEQ ID NO: 8547 - DNA, 39 bp, synthetic construct
  misc_feature 1..39: note = Synthetic construct
  source 1..39: mol_type = other DNA
tgtcagcagtatggcagctcacctcccccgtacactttt

SEQ ID NO: 8548 - DNA, 30 bp, synthetic construct
  misc_feature 1..30: note = Synthetic construct
  source 1..30: mol_type = other DNA
tgtcagcagtatggtggctcacccactttc

SEQ ID NO: 8549 - DNA, 33 bp, synthetic construct
  misc_feature 1..33: note = Synthetic construct
  source 1..33: mol_type = other DNA
tgtcagcagtacggtagttcagtgtggacgttc

SEQ ID NO: 8550 - DNA, 39 bp, synthetic construct
  misc_feature 1..39: note = Synthetic construct
  source 1..39: mol_type = other DNA
tgtcaggtgtgggatagcagtagtgatcatgtggcattc

SEQ ID NO: 8551 - DNA, 42 bp, synthetic construct
  misc_feature 1..42: note = Synthetic construct
  source 1..42: mol_type = other DNA
tgttcagcatgggatgaaagtctgaatggtcatgtgatattc

SEQ ID NO: 8552 - DNA, 30 bp, synthetic construct
  misc_feature 1..30: note = Synthetic construct
  source 1..30: mol_type = other DNA
tgtcaacagagcttcagtagtgtcaccttc

SEQ ID NO: 8553 - DNA, 39 bp, synthetic construct
  misc_feature 1..39: note = Synthetic construct
  source 1..39: mol_type = other DNA
tgctgctcaaatgcaggttgtaggacttggggtgtcttc

SEQ ID NO: 8554 - DNA, 33 bp, synthetic construct
  misc_feature 1..33: note = Synthetic construct
  source 1..33: mol_type = other DNA
tgcatgcaaggtatataccttccgctcactttc

SEQ ID NO: 8555 - DNA, 33 bp, synthetic construct
  misc_feature 1..33: note = Synthetic construct
  source 1..33: mol_type = other DNA
tgtcaacagcttaatagtaacccattcactttc

SEQ ID NO: 8556 - DNA, 30 bp, synthetic construct
  misc_feature 1..30: note = Synthetic construct
  source 1..30: mol_type = other DNA
tgtcaacagtattatagttacccctttttc

SEQ ID NO: 8557 - DNA, 33 bp, synthetic construct
  misc_feature 1..33: note = Synthetic construct
  source 1..33: mol_type = other DNA
tgtcaacagtattatagttacccgtggacgttc

SEQ ID NO: 8558 - DNA, 36 bp, synthetic construct
  misc_feature 1..36: note = Synthetic construct
  source 1..36: mol_type = other DNA
tgtcagtcatcagacagcagtggtaattttgtcttc

SEQ ID NO: 8559 - DNA, 42 bp, synthetic construct
  misc_feature 1..42: note = Synthetic construct
  source 1..42: mol_type = other DNA
tgtgcagcatgggatgacagcctgggtggtggggatgtcttc

SEQ ID NO: 8560 - DNA, 39 bp, synthetic construct
  misc_feature 1..39: note = Synthetic construct
  source 1..39: mol_type = other DNA
tgcctacagtataatagttcttcttcaacatacactttt

SEQ ID NO: 8561 - DNA, 36 bp, synthetic construct
  misc_feature 1..36: note = Synthetic construct
  source 1..36: mol_type = other DNA
tgctgctcgtatgcagggactagcactttcgtgttc

SEQ ID NO: 8562 - DNA, 33 bp, synthetic construct
  misc_feature 1..33: note = Synthetic construct
  source 1..33: mol_type = other DNA
tgtgaacaggctaacagtttcccgctcactttc

SEQ ID NO: 8563 - DNA, 45 bp, synthetic construct
  misc_feature 1..45: note = Synthetic construct
  source 1..45: mol_type = other DNA
tgtggggcagaccatgacagtgggagcaacttcgtttatgtcttc

SEQ ID NO: 8564 - DNA, 33 bp, synthetic construct
  misc_feature 1..33: note = Synthetic construct
  source 1..33: mol_type = other DNA
tgtcaacaacttaatggttaccctccaactttt

SEQ ID NO: 8565 - DNA, 33 bp, synthetic construct
  misc_feature 1..33: note = Synthetic construct
  source 1..33: mol_type = other DNA
tgtcaccagtatagtacctcaccgtggacgttc

SEQ ID NO: 8566 - DNA, 33 bp, synthetic construct
  misc_feature 1..33: note = Synthetic construct
  source 1..33: mol_type = other DNA
tgtcaccaatattataatattcctcgaacattc

SEQ ID NO: 8567 - DNA, 30 bp, synthetic construct
  misc_feature 1..30: note = Synthetic construct
  source 1..30: mol_type = other DNA
tgtcaccaatattatagtactctcactttc

SEQ ID NO: 8568 - DNA, 30 bp, synthetic construct
  misc_feature 1..30: note = Synthetic construct
  source 1..30: mol_type = other DNA
tgcatgcaaggtacacacctttacaccttt

SEQ ID NO: 8569 - DNA, 33 bp, synthetic construct; identical to SEQ ID NO: 1838
  misc_feature 1..33: note = Synthetic construct
  source 1..33: mol_type = other DNA

SEQ ID NO: 8570 - DNA, 39 bp, synthetic construct
  misc_feature 1..39: note = Synthetic construct
  source 1..39: mol_type = other DNA
tgcagctcatatagacgtgacatcgccctttatgtcttc

SEQ ID NO: 8571 - DNA, 39 bp, synthetic construct
  misc_feature 1..39: note = Synthetic construct
  source 1..39: mol_type = other DNA
tgcacctcatatacaaacgacagcaattctcaggtattc

SEQ ID NO: 8572 - DNA, 39 bp, synthetic construct
  misc_feature 1..39: note = Synthetic construct
  source 1..39: mol_type = other DNA
tgctgttcgtatgcaagtagtagcactttcgtgattttc

SEQ ID NO: 8573 - DNA, 39 bp, synthetic construct
  misc_feature 1..39: note = Synthetic construct
  source 1..39: mol_type = other DNA
tgtcaggtgtgggatagtagtagtgatcattatgtcttc

SEQ ID NO: 8574 - DNA, 36 bp, synthetic construct
  misc_feature 1..36: note = Synthetic construct
  source 1..36: mol_type = other DNA
tgtcaccagcggagcagctggcctccgtacacttat

SEQ ID NO: 8575 - DNA, 33 bp, synthetic construct
  misc_feature 1..33: note = Synthetic construct
  source 1..33: mol_type = other DNA
tgcatgcagggtacacactggcctcggacgttc

SEQ ID NO: 8576 - DNA, 33 bp, synthetic construct
  misc_feature 1..33: note = Synthetic construct
  source 1..33: mol_type = other DNA
tgtcagcaatataataactggccgtacactttt

SEQ ID NO: 8577 - DNA, 33 bp, synthetic construct
  misc_feature 1..33: note = Synthetic construct
  source 1..33: mol_type = other DNA
tgtcagacctgggacactggcgttcgcctgttc

SEQ ID NO: 8578 - DNA, 42 bp, synthetic construct
  misc_feature 1..42: note = Synthetic construct
  source 1..42: mol_type = other DNA
tgccagtcctatgacttcagcctgagtggttcggatgtcttc

SEQ ID NO: 8579 - DNA, 33 bp, synthetic construct
  misc_feature 1..33: note = Synthetic construct
  source 1..33: mol_type = other DNA
tgtcaacagtatggtacttcacctgtcactttt

SEQ ID NO: 8580 - DNA, 36 bp, synthetic construct
  misc_feature 1..36: note = Synthetic construct
  source 1..36: mol_type = other DNA
tgtgagcaacgtattagctggcctggaatcaccttc

SEQ ID NO: 8581 - DNA, 33 bp, synthetic construct
  misc_feature 1..33: note = Synthetic construct
  source 1..33: mol_type = other DNA
tgtcagcagtacggttattcacggtggacattc

SEQ ID NO: 8582 - DNA, 33 bp, synthetic construct
  misc_feature 1..33: note = Synthetic construct
  source 1..33: mol_type = other DNA
tgcatgcaaggtacacactggcctccggggttc

SEQ ID NO: 8583 - DNA, 36 bp, synthetic construct
  misc_feature 1..36: note = Synthetic construct
  source 1..36: mol_type = other DNA
tgctgctcatatgcagctagtagagttaaggtgttc

SEQ ID NO: 8584 - DNA, 33 bp, synthetic construct
  misc_feature 1..33: note = Synthetic construct
  source 1..33: mol_type = other DNA
tgtcaccaatattatactcctccattcactttc

SEQ ID NO: 8585 - DNA, 36 bp, synthetic construct
  misc_feature 1..36: note = Synthetic construct
  source 1..36: mol_type = other DNA
tgtctccaccgtaacaactggcctcccttcactttc

SEQ ID NO: 8586 - DNA, 36 bp, synthetic construct
  misc_feature 1..36: note = Synthetic construct
  source 1..36: mol_type = other DNA
tgcttgctctcctatagtggtgctcattatgtcttc

SEQ ID NO: 8587 - DNA, 33 bp, synthetic construct
  misc_feature 1..33: note = Synthetic construct
  source 1..33: mol_type = other DNA
tgtctacagcatgatagttaccccctcactttc

SEQ ID NO: 8588 - DNA, 33 bp, synthetic construct
  misc_feature 1..33: note = Synthetic construct
  source 1..33: mol_type = other DNA
tgtctgcagcatattacctggccttggacattc

SEQ ID NO: 8589 - DNA, 36 bp, synthetic construct
  misc_feature 1..36: note = Synthetic construct
  source 1..36: mol_type = other DNA
tgcatgcaaggtacagactggcccccgtacactttt

SEQ ID NO: 8590 - DNA, 36 bp, synthetic construct
  misc_feature 1..36: note = Synthetic construct
  source 1..36: mol_type = other DNA
tgcatgcaaggtacacactggcctccggtgacgttc

SEQ ID NO: 8591 - DNA, 33 bp, synthetic construct
  misc_feature 1..33: note = Synthetic construct
  source 1..33: mol_type = other DNA
tgtcagcactatgatcatctcccgtggaccttc

SEQ ID NO: 8592 - DNA, 33 bp, synthetic construct
  misc_feature 1..33: note = Synthetic construct
  source 1..33: mol_type = other DNA
tgtcaacagtgtgatgatctcccgtacactttt

SEQ ID NO: 8593 - DNA, 33 bp, synthetic construct
  misc_feature 1..33: note = Synthetic construct
  source 1..33: mol_type = other DNA
tgtcaacagttttatggtgccccattcactttc

SEQ ID NO: 8594 - DNA, 33 bp, synthetic construct
  misc_feature 1..33: note = Synthetic construct
  source 1..33: mol_type = other DNA
tgtcagcagcgcagcaactggcctctcactttc

SEQ ID NO: 8595 - DNA, 33 bp, synthetic construct
  misc_feature 1..33: note = Synthetic construct
  source 1..33: mol_type = other DNA
tgtcaacagagttacgcctccccgactacgttt

SEQ ID NO: 8596 - DNA, 33 bp, synthetic construct
  misc_feature 1..33: note = Synthetic construct
  source 1..33: mol_type = other DNA
tgtcaacagagttacagaattcctcacaccttt

SEQ ID NO: 8597 - DNA, 33 bp, synthetic construct
  misc_feature 1..33: note = Synthetic construct
  source 1..33: mol_type = other DNA
tgtcaacagagttacagtaccccgctcactttc

SEQ ID NO: 8598 - DNA, 30 bp, synthetic construct
  misc_feature 1..30: note = Synthetic construct
  source 1..30: mol_type = other DNA
tgtcaacagacttacaatacgatcactttc

SEQ ID NO: 8599 - DNA, 33 bp, synthetic construct
  misc_feature 1..33: note = Synthetic construct
  source 1..33: mol_type = other DNA
tgtcaacaatatgatagtctcccggtcactttc

SEQ ID NO: 8600 - DNA, 33 bp, synthetic construct
  misc_feature 1..33: note = Synthetic construct
  source 1..33: mol_type = other DNA
tgtcaacaatatggtagctccctgtacagtttt

SEQ ID NO: 8601 - DNA, 33 bp, synthetic construct
  misc_feature 1..33: note = Synthetic construct
  source 1..33: mol_type = other DNA
tgtcagcagtatggtagctcaccgctcactttc

SEQ ID NO: 8602 - DNA, 39 bp, synthetic construct
  misc_feature 1..39: note = Synthetic construct
  source 1..39: mol_type = other DNA
tgtcagcagtatggtagctcacctccgcggttcactttc

SEQ ID NO: 8603 - DNA, 33 bp, synthetic construct
  misc_feature 1..33: note = Synthetic construct
  source 1..33: mol_type = other DNA
tgtcagcagtacggctatctgccactgactttt

SEQ ID NO: 8604 - DNA, 33 bp, synthetic construct
  misc_feature 1..33: note = Synthetic construct
  source 1..33: mol_type = other DNA
tgccaacagtataatgcttacccattcactttc

SEQ ID NO: 8605 - DNA, 36 bp, synthetic construct
  misc_feature 1..36: note = Synthetic construct
  source 1..36: mol_type = other DNA
tgtcagcagtataatcattggctccctctcactttc

SEQ ID NO: 8606 - DNA, 36 bp, synthetic construct
  misc_feature 1..36: note = Synthetic construct
  source 1..36: mol_type = other DNA
tgtcagcaatataataagtggcctccgtggacgttc

SEQ ID NO: 8607 - DNA, 36 bp, synthetic construct
  misc_feature 1..36: note = Synthetic construct
  source 1..36: mol_type = other DNA
tgtcagcagtataataactggcccccattcactttc

SEQ ID NO: 8608 - DNA, 33 bp, synthetic construct
  misc_feature 1..33: note = Synthetic construct
  source 1..33: mol_type = other DNA
tgtcagcagtataatagctggccatttactttc

SEQ ID NO: 8609 - DNA, 30 bp, synthetic construct
  misc_feature 1..30: note = Synthetic construct
  source 1..30: mol_type = other DNA
tgccaacagtataatagttattggacgttc

SEQ ID NO: 8610 - DNA, 36 bp, synthetic construct
  misc_feature 1..36: note = Synthetic construct
  source 1..36: mol_type = other DNA
tgtcagcaatataatgtctggcctacgatcaccttc

SEQ ID NO: 8611 - DNA, 33 bp, synthetic construct
  misc_feature 1..33: note = Synthetic construct
  source 1..33: mol_type = other DNA
tgtcagcagtatcgtagctcaccattcactttc

SEQ ID NO: 8612 - DNA, 33 bp, synthetic construct
  misc_feature 1..33: note = Synthetic construct
  source 1..33: mol_type = other DNA
tgtcagcagtatcgttactcaccgaggacgttc

SEQ ID NO: 8613 - DNA, 30 bp, synthetic construct
  misc_feature 1..30: note = Synthetic construct
  source 1..30: mol_type = other DNA
tgtcagcaatattctagtttcgggactttc

SEQ ID NO: 8614 - DNA, 33 bp, synthetic construct
  misc_feature 1..33: note = Synthetic construct
  source 1..33: mol_type = other DNA
tgtcagcaatattataatactccgtacactttt

SEQ ID NO: 8615 - DNA, 33 bp, synthetic construct
  misc_feature 1..33: note = Synthetic construct
  source 1..33: mol_type = other DNA
tgtcaacagtattatagtttccctcgaacgttc

SEQ ID NO: 8616 - DNA, 33 bp, synthetic construct
  misc_feature 1..33: note = Synthetic construct
  source 1..33: mol_type = other DNA
tgtcagcaatattatagtactccgtacactttt

SEQ ID NO: 8617 - DNA, 33 bp, synthetic construct
  misc_feature 1..33: note = Synthetic construct
  source 1..33: mol_type = other DNA
tgtcaacagtattatagttaccctctaacgttc

SEQ ID NO: 8618 - DNA, 33 bp, synthetic construct
  misc_feature 1..33: note = Synthetic construct
  source 1..33: mol_type = other DNA
tgtcaacagtattatactattccgcggacgttc

SEQ ID NO: 8619 - DNA, 39 bp, synthetic construct
  misc_feature 1..39: note = Synthetic construct
  source 1..39: mol_type = other DNA
tgtcaatcagcagacagcggtggtacttctgtgacattc

SEQ ID NO: 8620 - DNA, 39 bp, synthetic construct
  misc_feature 1..39: note = Synthetic construct
  source 1..39: mol_type = other DNA
tgtcagtcccgggacagcagtggtaaccagctggtgttc

SEQ ID NO: 8621 - DNA, 36 bp, synthetic construct
  misc_feature 1..36: note = Synthetic construct
  source 1..36: mol_type = other DNA
tgtcaatcagtagacagaagtggttctcatgtcttc

SEQ ID NO: 8622 - DNA, 39 bp, synthetic construct
  misc_feature 1..39: note = Synthetic construct
  source 1..39: mol_type = other DNA
tgtcaggtgtgggatagtagtagtgatcattgggtgttc

SEQ ID NO: 8623 - DNA, 39 bp, synthetic construct
  misc_feature 1..39: note = Synthetic construct
  source 1..39: mol_type = other DNA
tgcacctcatatacaaacgacagcaattctcaggcattc

SEQ ID NO: 8624 - DNA, 39 bp, synthetic construct
  misc_feature 1..39: note = Synthetic construct
  source 1..39: mol_type = other DNA
tgcacctcatatacaaacgacagcaattctcagctattc

SEQ ID NO: 8625 - DNA, 39 bp, synthetic construct
  misc_feature 1..39: note = Synthetic construct
  source 1..39: mol_type = other DNA
tgcacctcatatacaaacgacaccaattctcaggtattc

SEQ ID NO: 8626 - DNA, 39 bp, synthetic construct
  misc_feature 1..39: note = Synthetic construct
  source 1..39: mol_type = other DNA
tgcacctcatatacaaacaacaacaattctcaggtattc

SEQ ID NO: 8627 - DNA, 39 bp, synthetic construct
  misc_feature 1..39: note = Synthetic construct
  source 1..39: mol_type = other DNA
tgcacctcatatacaaacaacagcaattctcatgtattc

SEQ ID NO: 8628 - DNA, 39 bp, synthetic construct
  misc_feature 1..39: note = Synthetic construct
  source 1..39: mol_type = other DNA
tgcacctcatatacaaacaacagcaattcccaggtattc

SEQ ID NO: 8629 - DNA, 33 bp, synthetic construct
  misc_feature 1..33: note = Synthetic construct
  source 1..33: mol_type = other DNA
tgtcaacactatgatcatctccctctcactttc

SEQ ID NO: 8630 - DNA, 33 bp, synthetic construct
  misc_feature 1..33: note = Synthetic construct
  source 1..33: mol_type = other DNA
tgtcagcagtatggtagctcaccgtggacgttc

SEQ ID NO: 8631 - DNA, 33 bp, synthetic construct
  misc_feature 1..33: note = Synthetic construct
  source 1..33: mol_type = other DNA
tgtcagcagtattatagtacttcgtggacgttc

SEQ ID NO: 8632 - DNA, 30 bp, synthetic construct
  misc_feature 1..30: note = Synthetic construct
  source 1..30: mol_type = other DNA
tgtcagcaatatggtaattcagggacgttc

SEQ ID NO: 8633 - DNA, 30 bp, synthetic construct
  misc_feature 1..30: note = Synthetic construct
  source 1..30: mol_type = other DNA
tgtcagcagtatggtggctcatccaccttc

SEQ ID NO: 8634 - DNA, 36 bp, synthetic construct
  misc_feature 1..36: note = Synthetic construct
  source 1..36: mol_type = other DNA
tgtcagcagcgtagcaactggccttcgctcactttc

SEQ ID NO: 8635 - DNA, 42 bp, synthetic construct
  misc_feature 1..42: note = Synthetic construct
  source 1..42: mol_type = other DNA
tgtaactcccgggacagcagtggtaaccatctgggggtcttc

SEQ ID NO: 8636 - DNA, 39 bp, synthetic construct
  misc_feature 1..39: note = Synthetic construct
  source 1..39: mol_type = other DNA
tgtcaggtgtgggatagtagtagtgatcatgtggtattc

SEQ ID NO: 8637 - DNA, 33 bp, synthetic construct
  misc_feature 1..33: note = Synthetic construct
  source 1..33: mol_type = other DNA
tgtcagcagtataagagctggcccctcgcgttc

SEQ ID NO: 8638 - DNA, 39 bp, synthetic construct
  misc_feature 1..39: note = Synthetic construct
  source 1..39: mol_type = other DNA
tgtgcagcgtgggatgacaccctgagtgcttgggtgttc

SEQ ID NO: 8639 - DNA, 33 bp, synthetic construct
  misc_feature 1..33: note = Synthetic construct
  source 1..33: mol_type = other DNA
tgtcagcagtatggtagctcacctcaaacgttc

SEQ ID NO: 8640 - DNA, 36 bp, synthetic construct
  misc_feature 1..36: note = Synthetic construct
  source 1..36: mol_type = other DNA
tgtcagcagcgtagcaactggcctccgtggacgttc

SEQ ID NO: 8641 - DNA, 33 bp, synthetic construct
  misc_feature 1..33: note = Synthetic construct
  source 1..33: mol_type = other DNA
tgcatgcaacgtatagagtttccgtggacgttc

SEQ ID NO: 8642 - DNA, 42 bp, synthetic construct
  misc_feature 1..42: note = Synthetic construct
  source 1..42: mol_type = other DNA
tgtgcagcatgggatgacagcctgagtggtcggggggtattc

SEQ ID NO: 8643 - DNA, 33 bp, synthetic construct
  misc_feature 1..33: note = Synthetic construct
  source 1..33: mol_type = other DNA
tgtcaacagagttacagtaccccgtacactttt

SEQ ID NO: 8644 - DNA, 36 bp, synthetic construct
  misc_feature 1..36: note = Synthetic construct
  source 1..36: mol_type = other DNA
tgctgctcatatgcaggcagctacacttgggtgttc

SEQ ID NO: 8645 - DNA, 33 bp, synthetic construct
  misc_feature 1..33: note = Synthetic construct
  source 1..33: mol_type = other DNA
tgtgtacaggattacgattaccctcatacattc

SEQ ID NO: 8646 - DNA, 39 bp, synthetic construct
  misc_feature 1..39: note = Synthetic construct
  source 1..39: mol_type = other DNA
tgcacctcatatacaaacgacagcaattctcaggtcttc

SEQ ID NO: 8647 - DNA, 39 bp, synthetic construct
  misc_feature 1..39: note = Synthetic construct
  source 1..39: mol_type = other DNA
tgtcaatcagtaggcactaatcatctttctgtggtcttc

SEQ ID NO: 8648 - DNA, 39 bp, synthetic construct
  misc_feature 1..39: note = Synthetic construct
  source 1..39: mol_type = other DNA
tgcacctcatatgcaggcagcaacaatttcagggtcttc

SEQ ID NO: 8649 - DNA, 39 bp, synthetic construct
  misc_feature 1..39: note = Synthetic construct
  source 1..39: mol_type = other DNA
tgcgccgcttgggatgaccacctgcgaattgtgggtttc

SEQ ID NO: 8650 - DNA, 39 bp, synthetic construct
  misc_feature 1..39: note = Synthetic construct
  source 1..39: mol_type = other DNA
tgtcaatcttatgataccaccacggatcatgcagtcttc

SEQ ID NO: 8651 - DNA, 33 bp, synthetic construct
  misc_feature 1..33: note = Synthetic construct
  source 1..33: mol_type = other DNA
tgtcaacagtatcatagtaccccgtggacgttc

SEQ ID NO: 8652 - DNA, 33 bp, synthetic construct
  misc_feature 1..33: note = Synthetic construct
  source 1..33: mol_type = other DNA
tgtctacaacataatagttaccctcgaacgttc

SEQ ID NO: 8653 - DNA, 33 bp, synthetic construct
  misc_feature 1..33: note = Synthetic construct
  source 1..33: mol_type = other DNA
tgccaacagtatagtactgattcggcgacgttc

SEQ ID NO: 8654 - DNA, 42 bp, synthetic construct
  misc_feature 1..42: note = Synthetic construct
  source 1..42: mol_type = other DNA
tgccagtcctatgacagtagcctgagtgattcgaaagtattc

SEQ ID NO: 8655 - DNA, 33 bp, synthetic construct
  misc_feature 1..33: note = Synthetic construct
  source 1..33: mol_type = other DNA
tgtcagcaatcttatactagtcctgtcactttc

SEQ ID NO: 8656 - DNA, 33 bp, synthetic construct
  misc_feature 1..33: note = Synthetic construct
  source 1..33: mol_type = other DNA
tgtcagcagtatgcttcctcaccggtcactttc

SEQ ID NO: 8657 - DNA, 33 bp, synthetic construct
  misc_feature 1..33: note = Synthetic construct
  source 1..33: mol_type = other DNA
tgccaacactgtgatagttatccgtggacgttc

SEQ ID NO: 8658 - DNA, 33 bp, synthetic construct
  misc_feature 1..33: note = Synthetic construct
  source 1..33: mol_type = other DNA
tgttactctgcggctgacaacaatcgagtcttc

SEQ ID NO: 8659 - DNA, 39 bp, synthetic construct
  misc_feature 1..39: note = Synthetic construct
  source 1..39: mol_type = other DNA
tgtcaggcgtgggatgttgatagtgatcaaatggttttc

SEQ ID NO: 8660 - DNA, 30 bp, synthetic construct
  misc_feature 1..30: note = Synthetic construct
  source 1..30: mol_type = other DNA
tgtcagcagtatgctacctcaccgactttt

SEQ ID NO: 8661 - DNA, 36 bp, synthetic construct
  misc_feature 1..36: note = Synthetic construct
  source 1..36: mol_type = other DNA
tgtcagcagtattataactggcctccgcacactttt

SEQ ID NO: 8662 - DNA, 33 bp, synthetic construct
  misc_feature 1..33: note = Synthetic construct
  source 1..33: mol_type = other DNA
tgtctgcggtgtaacggtttccctctcactttc

SEQ ID NO: 8663 - DNA, 36 bp, synthetic construct
  misc_feature 1..36: note = Synthetic construct
  source 1..36: mol_type = other DNA
tgtcagcactatcctatgtcacctccgatcaccttc

SEQ ID NO: 8664 - DNA, 30 bp, synthetic construct
  misc_feature 1..30: note = Synthetic construct
  source 1..30: mol_type = other DNA
tgccaacagtatcagagttattcgactttc

SEQ ID NO: 8665 - DNA, 39 bp, synthetic construct
  misc_feature 1..39: note = Synthetic construct
  source 1..39: mol_type = other DNA
tgtgcagcatgggatgacaccctgcatggtgtggttttc

SEQ ID NO: 8666 - DNA, 33 bp, synthetic construct
  misc_feature 1..33: note = Synthetic construct
  source 1..33: mol_type = other DNA
tgttactctgcggctgacaagagtctggtattc

SEQ ID NO: 8667 - DNA, 42 bp, synthetic construct
  misc_feature 1..42: note = Synthetic construct
  source 1..42: mol_type = other DNA
tgtcaatccgcagacagtagtggttcttatcctgtggttttc

SEQ ID NO: 8668 - DNA, 36 bp, synthetic construct
  misc_feature 1..36: note = Synthetic construct
  source 1..36: mol_type = other DNA
tgcagctcattggaaggcaggaacaattgggtgttc

SEQ ID NO: 8669 - DNA, 33 bp, synthetic construct
  misc_feature 1..33: note = Synthetic construct
  source 1..33: mol_type = other DNA
tgtcaacagtataagagttacaagtggacgttc

SEQ ID NO: 8670 - DNA, 42 bp, synthetic construct
  misc_feature 1..42: note = Synthetic construct
  source 1..42: mol_type = other DNA
tgccagtcctttgacaacagtgtgggtgtccaagtgattttc

SEQ ID NO: 8671 - DNA, 33 bp, synthetic construct
  misc_feature 1..33: note = Synthetic construct
  source 1..33: mol_type = other DNA
tgcatgcagcatctaaaaattcctcggactttt

SEQ ID NO: 8672 - DNA, 39 bp, synthetic construct
  misc_feature 1..39: note = Synthetic construct
  source 1..39: mol_type = other DNA
tgtcagcagtatagtggctcacttcccccatacactttt

SEQ ID NO: 8673 - DNA, 33 bp, synthetic construct
  misc_feature 1..33: note = Synthetic construct
  source 1..33: mol_type = other DNA
tgtcagtcttatgatggcagcaatcagttattc

SEQ ID NO: 8674 - DNA, 39 bp, synthetic construct
  misc_feature 1..39: note = Synthetic construct
  source 1..39: mol_type = other DNA
tgccaacagtataatacttactctcccacgtgggcattc

SEQ ID NO: 8675 - DNA, 33 bp, synthetic construct
  misc_feature 1..33: note = Synthetic construct
  source 1..33: mol_type = other DNA
tgccaacactataatagttacccgtacactttt

SEQ ID NO: 8676 - DNA, 36 bp, synthetic construct
  misc_feature 1..36: note = Synthetic construct
  source 1..36: mol_type = other DNA
tgtcaggcgtgggacagcaacacttttgtgatgttc

SEQ ID NO: 8677 - DNA, 36 bp, synthetic construct
  misc_feature 1..36: note = Synthetic construct
  source 1..36: mol_type = other DNA
tgtcaacaatataatgactggcctccggtcactttc

SEQ ID NO: 8678 - DNA, 30 bp, synthetic construct
  misc_feature 1..30: note = Synthetic construct
  source 1..30: mol_type = other DNA
tgtcagcaatatggtagctcacccactttc

SEQ ID NO: 8679 - DNA, 33 bp, synthetic construct
  misc_feature 1..33: note = Synthetic construct
  source 1..33: mol_type = other DNA
tgtcagcagtattttcgtagtcctcacacgttc

SEQ ID NO: 8680 - DNA, 33 bp, synthetic construct
  misc_feature 1..33: note = Synthetic construct
  source 1..33: mol_type = other DNA
tgcatgcaagggacacactggcctctgactttt

SEQ ID NO: 8681 - DNA, 33 bp, synthetic construct
  misc_feature 1..33: note = Synthetic construct
  source 1..33: mol_type = other DNA
tgtcaacagtataatagtctcccgtggacgttc

SEQ ID NO: 8682 - DNA, 36 bp, synthetic construct
  misc_feature 1..36: note = Synthetic construct
  source 1..36: mol_type = other DNA
tgtcagcaatttggtggctcccctctgtacactttt

SEQ ID NO: 8683 - DNA, 36 bp, synthetic construct
  misc_feature 1..36: note = Synthetic construct
  source 1..36: mol_type = other DNA
tgtcagcagtattatgactggcctccgtggacgttc

SEQ ID NO: 8684 - DNA, 42 bp, synthetic construct
  misc_feature 1..42: note = Synthetic construct
  source 1..42: mol_type = other DNA
tgtgttgcatgggatgtcaatctgagtggtcctgtgctcatc

SEQ ID NO: 8685 - DNA, 36 bp, synthetic construct
  misc_feature 1..36: note = Synthetic construct
  source 1..36: mol_type = other DNA
tgtcaacagagttacagtaccctcgcggtcactttc

SEQ ID NO: 8686 - DNA, 36 bp, synthetic construct
  misc_feature 1..36: note = Synthetic construct
  source 1..36: mol_type = other DNA
tgtcttctctatatgggtactggctcttgggtgttc

SEQ ID NO: 8687 - DNA, 33 bp, synthetic construct
  misc_feature 1..33: note = Synthetic construct
  source 1..33: mol_type = other DNA
tgtcagcagtatgttagttcacccctgacgttc

SEQ ID NO: 8688 - DNA, 33 bp, synthetic construct
  misc_feature 1..33: note = Synthetic construct
  source 1..33: mol_type = other DNA
tgtcaccagtatggtagttcagcgaggactttt

SEQ ID NO: 8689 - DNA, 33 bp, synthetic construct
  misc_feature 1..33: note = Synthetic construct
  source 1..33: mol_type = other DNA
tgccaacactatgatagatattcagcgacgttc

SEQ ID NO: 8690 - DNA, 33 bp, synthetic construct
  misc_feature 1..33: note = Synthetic construct
  source 1..33: mol_type = other DNA
tgtcaacagtatggcagttcgcctcagacgttc

SEQ ID NO: 8691 - DNA, 30 bp, synthetic construct
  misc_feature 1..30: note = Synthetic construct
  source 1..30: mol_type = other DNA
tgtcatcagagtagtagttggtacactttt

SEQ ID NO: 8692 - DNA, 39 bp, synthetic construct
  misc_feature 1..39: note = Synthetic construct
  source 1..39: mol_type = other DNA
tgtcagcagcggagcaatgggcgtccgagggtcactttc

SEQ ID NO: 8693 - DNA, 33 bp, synthetic construct
  misc_feature 1..33: note = Synthetic construct
  source 1..33: mol_type = other DNA
tgtctacaagattacaattacccctggaagttc

SEQ ID NO: 8694 - DNA, 33 bp, synthetic construct
  misc_feature 1..33: note = Synthetic construct
  source 1..33: mol_type = other DNA
tgtcaacagagttacagtaccccgtggacgttc

SEQ ID NO: 8695 - DNA, 30 bp, synthetic construct
  misc_feature 1..30: note = Synthetic construct
  source 1..30: mol_type = other DNA
tgtcagcagtatggtagctcaccaacgttc

SEQ ID NO: 8696 - DNA, 33 bp, synthetic construct
  misc_feature 1..33: note = Synthetic construct
  source 1..33: mol_type = other DNA
tgcatgcaagctacacaatttcctcagacgttc

SEQ ID NO: 8697 - DNA, 36 bp, synthetic construct
  misc_feature 1..36: note = Synthetic construct
  source 1..36: mol_type = other DNA
tgtcagcagtataataactggcctacgtacactttt

SEQ ID NO: 8698 - DNA, 39 bp, synthetic construct
  misc_feature 1..39: note = Synthetic construct
  source 1..39: mol_type = other DNA
tgtcaatcagcagacagcagtggtacttatgtggtattc

SEQ ID NO: 8699 - DNA, 36 bp, synthetic construct
  misc_feature 1..36: note = Synthetic construct
  source 1..36: mol_type = other DNA
tgctgctcatatgcaggcagctacacttatgtcttc

SEQ ID NO: 8700 - DNA, 33 bp, synthetic construct
  misc_feature 1..33: note = Synthetic construct
  source 1..33: mol_type = other DNA
tgtctacaggattacaattacccgtgggcgttc

SEQ ID NO: 8701 - DNA, 33 bp, synthetic construct
  misc_feature 1..33: note = Synthetic construct
  source 1..33: mol_type = other DNA
tgtcagtcttatgaaaacagttattgggtgttc

SEQ ID NO: 8702 - DNA, 33 bp, synthetic construct
  misc_feature 1..33: note = Synthetic construct
  source 1..33: mol_type = other DNA
tgtcagcaatattataactggcctcggacgttc

SEQ ID NO: 8703 - DNA, 39 bp, synthetic construct
  misc_feature 1..39: note = Synthetic construct
  source 1..39: mol_type = other DNA
tgtcaggtgtgggatagtagtggtgatcatccggtgttc

SEQ ID NO: 8704 - DNA, 36 bp, synthetic construct
  misc_feature 1..36: note = Synthetic construct
  source 1..36: mol_type = other DNA
tgctgctcatatgcaggcagctacactcatgtcttc

SEQ ID NO: 8705 - DNA, 36 bp, synthetic construct
  misc_feature 1..36: note = Synthetic construct
  source 1..36: mol_type = other DNA
tgtcaggaatttcatgatactctcgggctcactttc

SEQ ID NO: 8706 - DNA, 33 bp, synthetic construct
  misc_feature 1..33: note = Synthetic construct
  source 1..33: mol_type = other DNA
tgtcagcagacttacagtgccccatggacgttc

SEQ ID NO: 8707 - DNA, 36 bp, synthetic construct
  misc_feature 1..36: note = Synthetic construct
  source 1..36: mol_type = other DNA
tgtcaacattatgttaactggcctccgtggacgttc

SEQ ID NO: 8708 - DNA, 33 bp, synthetic construct
  misc_feature 1..33: note = Synthetic construct
  source 1..33: mol_type = other DNA
tgtctacaacataatagttaccctctcactttc

SEQ ID NO: 8709 - DNA, 33 bp, synthetic construct
  misc_feature 1..33: note = Synthetic construct
  source 1..33: mol_type = other DNA
tgcatgcaggctctacagactcctcccaccttc

SEQ ID NO: 8710 - DNA, 33 bp, synthetic construct
  misc_feature 1..33: note = Synthetic construct
  source 1..33: mol_type = other DNA
tgtcaacagagttacagcacccccttcactttc

SEQ ID NO: 8711 - DNA, 39 bp, synthetic construct
  misc_feature 1..39: note = Synthetic construct
  source 1..39: mol_type = other DNA
tgttattcccgtgccggtactggtgaccatgtggtgttc

SEQ ID NO: 8712 - DNA, 36 bp, synthetic construct
  misc_feature 1..36: note = Synthetic construct
  source 1..36: mol_type = other DNA
tgtcagcagcgtagcgactggccgcctctcactttc

SEQ ID NO: 8713 - DNA, 33 bp, synthetic construct
  misc_feature 1..33: note = Synthetic construct
  source 1..33: mol_type = other DNA
tgtcagcagtataatgactggccgtggacgttc

SEQ ID NO: 8714 - DNA, 33 bp, synthetic construct
  misc_feature 1..33: note = Synthetic construct
  source 1..33: mol_type = other DNA
tgtcaaaagtataacagtgccccgctcactttc

SEQ ID NO: 8715 - DNA, 33 bp, synthetic construct
  misc_feature 1..33: note = Synthetic construct
  source 1..33: mol_type = other DNA
tgtcaaaactataacagtgccccattcactttc

SEQ ID NO: 8716 - DNA, 39 bp, synthetic construct
  misc_feature 1..39: note = Synthetic construct
  source 1..39: mol_type = other DNA
tgtaactcccgggacaccagtggtaaccgttgggtgttc

SEQ ID NO: 8717 - DNA, 33 bp, synthetic construct
  misc_feature 1..33: note = Synthetic construct
  source 1..33: mol_type = other DNA
tgtcagcagtataatgactggctgatcacgttc

SEQ ID NO: 8718 - DNA, 39 bp, synthetic construct
  misc_feature 1..39: note = Synthetic construct
  source 1..39: mol_type = other DNA
tgtgcatcatgggatgacagcctgaatggttgggggttc

SEQ ID NO: 8719 - DNA, 36 bp, synthetic construct
  misc_feature 1..36: note = Synthetic construct
  source 1..36: mol_type = other DNA
tgtcaggtgtgggatagtagtactgatcatctattc

SEQ ID NO: 8720 - DNA, 39 bp, synthetic construct
  misc_feature 1..39: note = Synthetic construct
  source 1..39: mol_type = other DNA
tgtgcagtttgggatgacaacctgagggcttgggtgttc

SEQ ID NO: 8721 - DNA, 33 bp, synthetic construct
  misc_feature 1..33: note = Synthetic construct
  source 1..33: mol_type = other DNA
tgtcaaaagtataacagtgccccattcactttc

SEQ ID NO: 8722 - DNA, 33 bp, synthetic construct
  misc_feature 1..33: note = Synthetic construct
  source 1..33: mol_type = other DNA
tgccaacagtataatacttattcgtacactttt

SEQ ID NO: 8723 - DNA, 33 bp, synthetic construct
  misc_feature 1..33: note = Synthetic construct
  source 1..33: mol_type = other DNA
tgccaacagtataaaagttattcgtggacgttc

SEQ ID NO: 8724 - DNA, 39 bp, synthetic construct
  misc_feature 1..39: note = Synthetic construct
  source 1..39: mol_type = other DNA
tgtcagatttgggatattgacagtgatcattgggtgttc

SEQ ID NO: 8725 - DNA, 36 bp, synthetic construct
  misc_feature 1..36: note = Synthetic construct
  source 1..36: mol_type = other DNA
tgctgctcatatgcaggcagttacacttttctcttc

SEQ ID NO: 8726 - DNA, 36 bp, synthetic construct
  misc_feature 1..36: note = Synthetic construct
  source 1..36: mol_type = other DNA
tgtcaggtgtggaatagtattagtgattatgtcttc

SEQ ID NO: 8727 - DNA, 39 bp, synthetic construct
  misc_feature 1..39: note = Synthetic construct
  source 1..39: mol_type = other DNA
tgccagtcctatgacagcagcctgagtgccgtggtattc

SEQ ID NO: 8728 - DNA, 33 bp, synthetic construct
  misc_feature 1..33: note = Synthetic construct
  source 1..33: mol_type = other DNA
tgtcagacctggggcactggcattcaggtgttc

SEQ ID NO: 8729 - DNA, 33 bp, synthetic construct
  misc_feature 1..33: note = Synthetic construct
  source 1..33: mol_type = other DNA
tgtcaacagtattatagttaccctccgacgttc

SEQ ID NO: 8730 - DNA, 39 bp, synthetic construct
  misc_feature 1..39: note = Synthetic construct
  source 1..39: mol_type = other DNA
tgtcaatcagcagacagcagtggtacttatcgggtattc

SEQ ID NO: 8731 - DNA, 33 bp, synthetic construct
  misc_feature 1..33: note = Synthetic construct
  source 1..33: mol_type = other DNA
tgtcagcaatattatagtactcttcggacgttc

SEQ ID NO: 8732 - DNA, 33 bp, synthetic construct
  misc_feature 1..33: note = Synthetic construct
  source 1..33: mol_type = other DNA
tgcttgctctcctatagtggtgcttgggtgttc

SEQ ID NO: 8733 - DNA, 33 bp, synthetic construct
  misc_feature 1..33: note = Synthetic construct
  source 1..33: mol_type = other DNA
tgtcaacagacttacagtgccccgtacactttt

SEQ ID NO: 8734 - DNA, 39 bp, synthetic construct
  misc_feature 1..39: note = Synthetic construct
  source 1..39: mol_type = other DNA
tgtcaatcagcagacagcagtggtctttattatgtcttc

SEQ ID NO: 8735 - DNA, 36 bp, synthetic construct
  misc_feature 1..36: note = Synthetic construct
  source 1..36: mol_type = other DNA
tgtcaacagagttacagtacccccctgtacactttt

SEQ ID NO: 8736 - DNA, 33 bp, synthetic construct
  misc_feature 1..33: note = Synthetic construct
  source 1..33: mol_type = other DNA
tgtctacaagattacaattaccctcgaacgttc

SEQ ID NO: 8737 - DNA, 33 bp, synthetic construct
  misc_feature 1..33: note = Synthetic construct
  source 1..33: mol_type = other DNA
tgtcagcagcgtagcaactggccggagactttt

SEQ ID NO: 8738 - DNA, 36 bp, synthetic construct
  misc_feature 1..36: note = Synthetic construct
  source 1..36: mol_type = other DNA
tgtcagcagcgtagcaactggcctccgatcaccttc

SEQ ID NO: 8739 - DNA, 39 bp, synthetic construct
  misc_feature 1..39: note = Synthetic construct
  source 1..39: mol_type = other DNA
tgtaactcccgggacagcagtggcaagcatctgctattc

SEQ ID NO: 8740 - DNA, 33 bp, synthetic construct
  misc_feature 1..33: note = Synthetic construct
  source 1..33: mol_type = other DNA
tgtcagtcttatgatagtacttatagggtgttc

SEQ ID NO: 8741 - DNA, 42 bp, synthetic construct
  misc_feature 1..42: note = Synthetic construct
  source 1..42: mol_type = other DNA
tgtaattcccgggacatgagtggtaaccatctgggggtcttc

SEQ ID NO: 8742 - DNA, 33 bp, synthetic construct
  misc_feature 1..33: note = Synthetic construct
  source 1..33: mol_type = other DNA
tgccaacagtataatagttattctcagacgttc

SEQ ID NO: 8743 - DNA, 42 bp, synthetic construct
  misc_feature 1..42: note = Synthetic construct
  source 1..42: mol_type = other DNA
tgtcaggtgtgggatagtagtagtgatcatccgggggtattc

SEQ ID NO: 8744 - DNA, 33 bp, synthetic construct
  misc_feature 1..33: note = Synthetic construct
  source 1..33: mol_type = other DNA
tgccaacagtataatagttattctcggacgttc

SEQ ID NO: 8745 - DNA, 39 bp, synthetic construct
  misc_feature 1..39: note = Synthetic construct
  source 1..39: mol_type = other DNA
tgtcaggcgtgggacagcagcactgccctttatgtcttc

SEQ ID NO: 8746 - DNA, 33 bp, synthetic construct
  misc_feature 1..33: note = Synthetic construct
  source 1..33: mol_type = other DNA
tgtcaacagtattatagttacccgctcactttc

SEQ ID NO: 8747 - DNA, 33 bp, synthetic construct
  misc_feature 1..33: note = Synthetic construct
  source 1..33: mol_type = other DNA
tgtcagcagtataataactggcctccgacgttc

SEQ ID NO: 8748 - DNA, 36 bp, synthetic construct
  misc_feature 1..36: note = Synthetic construct
  source 1..36: mol_type = other DNA
tgtcagcagtataataactggcctccgtacactttt

SEQ ID NO: 8749 - DNA, 39 bp, synthetic construct
  misc_feature 1..39: note = Synthetic construct
  source 1..39: mol_type = other DNA
tgtaactcccgggacagcagtggtaaccattatgtcttc

SEQ ID NO: 8750 - DNA, 33 bp, synthetic construct
  misc_feature 1..33: note = Synthetic construct
  source 1..33: mol_type = other DNA
tgccaacagtataatagttatctattcactttc

SEQ ID NO: 8751 - DNA, 33 bp, synthetic construct
  misc_feature 1..33: note = Synthetic construct
  source 1..33: mol_type = other DNA
tgtcaacaggccaacagtttcccgctctctttc

SEQ ID NO: 8752 - DNA, 33 bp, synthetic construct
  misc_feature 1..33: note = Synthetic construct
  source 1..33: mol_type = other DNA
tgtcagcaccgcagcacctggcctccgacgttc

SEQ ID NO: 8753 - DNA, 21 bp, synthetic construct
  misc_feature 1..21: note = Synthetic construct
  source 1..21: mol_type = other DNA
tgtcaacaccttaggacgttc

SEQ ID NO: 8754 - DNA, 36 bp, synthetic construct
  misc_feature 1..36: note = Synthetic construct
  source 1..36: mol_type = other DNA
tgctgctcatatgcaggtagtagtacttatgtcttc

SEQ ID NO: 8755 - DNA, 33 bp, synthetic construct
  misc_feature 1..33: note = Synthetic construct
  source 1..33: mol_type = other DNA
tgtcagcaatatcatagctggccgggcactttt

SEQ ID NO: 8756 - DNA, 33 bp, synthetic construct
  misc_feature 1..33: note = Synthetic construct
  source 1..33: mol_type = other DNA
tgccatcaatataatagttatccgacaacattc

SEQ ID NO: 8757 - DNA, 33 bp, synthetic construct
  misc_feature 1..33: note = Synthetic construct
  source 1..33: mol_type = other DNA
tgccaacactatgataattatccgtggacgttc

SEQ ID NO: 8758 - DNA, 39 bp, synthetic construct
  misc_feature 1..39: note = Synthetic construct
  source 1..39: mol_type = other DNA
tgtcaggtgtgggataacaatagtgaacatgaagtcttc

SEQ ID NO: 8759 - DNA, 36 bp, synthetic construct
  misc_feature 1..36: note = Synthetic construct
  source 1..36: mol_type = other DNA
tgccaacaatatgatagtcgttttccgtacactttt

SEQ ID NO: 8760 - DNA, 39 bp, synthetic construct
  misc_feature 1..39: note = Synthetic construct
  source 1..39: mol_type = other DNA
tgtgcagcatgggatgacagcctgaatggtccggtcttc

SEQ ID NO: 8761 - DNA, 39 bp, synthetic construct
  misc_feature 1..39: note = Synthetic construct
  source 1..39: mol_type = other DNA
tgtcagttgtataataactggcctcggagaatcactttc

SEQ ID NO: 8762 - DNA, 30 bp, synthetic construct
  misc_feature 1..30: note = Synthetic construct
  source 1..30: mol_type = other DNA
tgccaacattataatacttatagggcgttc

SEQ ID NO: 8763 - DNA, 33 bp, synthetic construct
  misc_feature 1..33: note = Synthetic construct
  source 1..33: mol_type = other DNA
tgtcagcaatactatactactccgtacactttt

SEQ ID NO: 8764 - DNA, 39 bp, synthetic construct
  misc_feature 1..39: note = Synthetic construct
  source 1..39: mol_type = other DNA
tgttgcgcaatggacgtcaggagtcaccaggtgaaattc

SEQ ID NO: 8765 - DNA, 33 bp, synthetic construct
  misc_feature 1..33: note = Synthetic construct
  source 1..33: mol_type = other DNA
tgccaacagtataatagttatctgtggacgttc

SEQ ID NO: 8766 - DNA, 36 bp, synthetic construct
  misc_feature 1..36: note = Synthetic construct
  source 1..36: mol_type = other DNA
tgcagctcatatacaagcagcagcactcgggtcttc

SEQ ID NO: 8767 - DNA, 42 bp, synthetic construct
  misc_feature 1..42: note = Synthetic construct
  source 1..42: mol_type = other DNA
tgtaactcctgggacaccagtggtaactatcccgtgatattc

SEQ ID NO: 8768 - DNA, 30 bp, synthetic construct
  misc_feature 1..30: note = Synthetic construct
  source 1..30: mol_type = other DNA
tgtcaccaatatgacaccatgtacactttt

SEQ ID NO: 8769 - DNA, 42 bp, synthetic construct
  misc_feature 1..42: note = Synthetic construct
  source 1..42: mol_type = other DNA
tgccagtcctatgacagcagcctgagtgtcttttatgtcttc

SEQ ID NO: 8770 - DNA, 39 bp, synthetic construct
  misc_feature 1..39: note = Synthetic construct
  source 1..39: mol_type = other DNA
tgtcaggtgtgggatagtactggcgatcatgtggtcttc

SEQ ID NO: 8771 - DNA, 33 bp, synthetic construct
  misc_feature 1..33: note = Synthetic construct
  source 1..33: mol_type = other DNA
tgtcagcagcgtggcgactggcctccgaccttc

SEQ ID NO: 8772 - DNA, 42 bp, synthetic construct
  misc_feature 1..42: note = Synthetic construct
  source 1..42: mol_type = other DNA
tgcagctcatatacaagcagcagcactctcgatgtggtattc

SEQ ID NO: 8773 - DNA, 33 bp, synthetic construct
  misc_feature 1..33: note = Synthetic construct
  source 1..33: mol_type = other DNA
tgcagctcatatgcaggcagctctgtggtattc

SEQ ID NO: 8774 - DNA, 30 bp, synthetic construct
  misc_feature 1..30: note = Synthetic construct
  source 1..30: mol_type = other DNA
tgtcagcagtatggtagctcactcactttc

SEQ ID NO: 8775 - DNA, 30 bp, synthetic construct
  misc_feature 1..30: note = Synthetic construct
  source 1..30: mol_type = other DNA
tgtcagcagtataataactggcctcgtttc

SEQ ID NO: 8776 - DNA, 33 bp, synthetic construct
  misc_feature 1..33: note = Synthetic construct
  source 1..33: mol_type = other DNA
tgtcaacagtataataactggcctcgaacgttc

SEQ ID NO: 8777 - DNA, 39 bp, synthetic construct
  misc_feature 1..39: note = Synthetic construct
  source 1..39: mol_type = other DNA
tgcggaacatatgatcgcagcctgagtgcttgggtgttc

SEQ ID NO: 8778 - DNA, 39 bp, synthetic construct
  misc_feature 1..39: note = Synthetic construct
  source 1..39: mol_type = other DNA
tgcggaacatgggatgccgaattgagagcgagggtgttc

SEQ ID NO: 8779 - DNA, 45 bp, synthetic construct
  misc_feature 1..45: note = Synthetic construct
  source 1..45: mol_type = other DNA
tgtcaggtgtgggatagcagtagtgatcctccgtgtgtggtgttc

SEQ ID NO: 8780 - DNA, 33 bp, synthetic construct
  misc_feature 1..33: note = Synthetic construct
  source 1..33: mol_type = other DNA
tgtcaacagagttacaatatcccgtacaccttt

SEQ ID NO: 8781 - DNA, 36 bp, synthetic construct
  misc_feature 1..36: note = Synthetic construct
  source 1..36: mol_type = other DNA
tgtcaacactatgcttactcaccaccgtggacgttc

SEQ ID NO: 8782 - DNA, 27 bp, synthetic construct
  misc_feature 1..27: note = Synthetic construct
  source 1..27: mol_type = other DNA
tgccaacagtataatagttacactttt

SEQ ID NO: 8783 - DNA, 36 bp, synthetic construct
  misc_feature 1..36: note = Synthetic construct
  source 1..36: mol_type = other DNA
tgcagctcatatacaaccaggattccttgtgtcttc

SEQ ID NO: 8784 - DNA, 33 bp, synthetic construct
  misc_feature 1..33: note = Synthetic construct
  source 1..33: mol_type = other DNA
tgtgagacctgggacagttacactcaggtgttc

SEQ ID NO: 8785 - DNA, 33 bp, synthetic construct
  misc_feature 1..33: note = Synthetic construct
  source 1..33: mol_type = other DNA
tgtcagcaatattttaattctcccatcaccttc

SEQ ID NO: 8786 - DNA, 33 bp, synthetic construct
  misc_feature 1..33: note = Synthetic construct
  source 1..33: mol_type = other DNA
tgccaacaatataatagttacatgtacactttt

SEQ ID NO: 8787 - DNA, 33 bp, synthetic construct
  misc_feature 1..33: note = Synthetic construct
  source 1..33: mol_type = other DNA
tgtcaaaagtataaccgtgccccccacactttt

SEQ ID NO: 8788 - DNA, 33 bp, synthetic construct
  misc_feature 1..33: note = Synthetic construct
  source 1..33: mol_type = other DNA
tgccaacagtataatagttattcgtggacgttc

SEQ ID NO: 8789 - DNA, 33 bp, synthetic construct
  misc_feature 1..33: note = Synthetic construct
  source 1..33: mol_type = other DNA
tgccaacagtatgatagttatcctcgaacgttc

SEQ ID NO: 8790 - DNA, 33 bp, synthetic construct
  misc_feature 1..33: note = Synthetic construct
  source 1..33: mol_type = other DNA
tgccaacaatataatatctatccggaaacgttc

SEQ ID NO: 8791 - DNA, 36 bp, synthetic construct
  misc_feature 1..36: note = Synthetic construct
  source 1..36: mol_type = other DNA
tgtcagcaccgtagcaactggcctccgtacactttt

SEQ ID NO: 8792 - DNA, 36 bp, synthetic construct
  misc_feature 1..36: note = Synthetic construct
  source 1..36: mol_type = other DNA
tgcttactcgcctttggtggtgtccggtgggtgttc

SEQ ID NO: 8793 - DNA, 39 bp, synthetic construct
  misc_feature 1..39: note = Synthetic construct
  source 1..39: mol_type = other DNA
tgccagtcctatgacagccgcctgagtggttatgtcttc

SEQ ID NO: 8794 - DNA, 30 bp, synthetic construct
  misc_feature 1..30: note = Synthetic construct
  source 1..30: mol_type = other DNA
tgtcaacagtatgataatctgatcaccttc

SEQ ID NO: 8795 - DNA, 30 bp, synthetic construct
  misc_feature 1..30: note = Synthetic construct
  source 1..30: mol_type = other DNA
tgccaacagtataatagttattcaactttc

SEQ ID NO: 8796 - DNA, 33 bp, synthetic construct
  misc_feature 1..33: note = Synthetic construct
  source 1..33: mol_type = other DNA
tgccaacaatataatagtgtcttatacactttt

SEQ ID NO: 8797 - DNA, 33 bp, synthetic construct
  misc_feature 1..33: note = Synthetic construct
  source 1..33: mol_type = other DNA
tgcatgcaaggtgcgcagtggcccccgacgttc

SEQ ID NO: 8798 - DNA, 33 bp, synthetic construct
  misc_feature 1..33: note = Synthetic construct
  source 1..33: mol_type = other DNA
tgtcaccagtatggcagttcgcgtcagacgttc

SEQ ID NO: 8799 - DNA, 39 bp, synthetic construct
  misc_feature 1..39: note = Synthetic construct
  source 1..39: mol_type = other DNA
tgctcctcatattcgcgcagcagcgattcttatgtcttc

SEQ ID NO: 8800 - DNA, 36 bp, synthetic construct
  misc_feature 1..36: note = Synthetic construct
  source 1..36: mol_type = other DNA
tgtcagcaatattataccagtcctccgtatactttc

SEQ ID NO: 8801 - DNA, 30 bp, synthetic construct
  misc_feature 1..30: note = Synthetic construct
  source 1..30: mol_type = other DNA
tgccaacaatatcaaagttattcttctttc

SEQ ID NO: 8802 - DNA, 33 bp, synthetic construct
  misc_feature 1..33: note = Synthetic construct
  source 1..33: mol_type = other DNA
tgtcatcaatattatgactggccgtggacgttc

SEQ ID NO: 8803 - DNA, 36 bp, synthetic construct
  misc_feature 1..36: note = Synthetic construct
  source 1..36: mol_type = other DNA
tgtcagcactataataagtggccccctttcactttc

SEQ ID NO: 8804 - DNA, 36 bp, synthetic construct
  misc_feature 1..36: note = Synthetic construct
  source 1..36: mol_type = other DNA
tgcagctcatatacaaccagcaacactctggtattc

SEQ ID NO: 8805 - DNA, 36 bp, synthetic construct
  misc_feature 1..36: note = Synthetic construct
  source 1..36: mol_type = other DNA
tgtcagcagtataataactggcctccgttcactttc

SEQ ID NO: 8806 - DNA, 36 bp, synthetic construct
  misc_feature 1..36: note = Synthetic construct
  source 1..36: mol_type = other DNA
tgtcaacagagttacagtacccctcggatcactttc

SEQ ID NO: 8807 - DNA, 36 bp, synthetic construct
  misc_feature 1..36: note = Synthetic construct
  source 1..36: mol_type = other DNA
tgtcaacagtattatagtacccctccgctcactttc

SEQ ID NO: 8808 - DNA, 33 bp, synthetic construct
  misc_feature 1..33: note = Synthetic construct
  source 1..33: mol_type = other DNA
tgtcaacagagttacttgaacaggtggacgttc

SEQ ID NO: 8809 - DNA, 39 bp, synthetic construct
  misc_feature 1..39: note = Synthetic construct
  source 1..39: mol_type = other DNA
tgttattcaacagacagcagtggtactcatagggtattc

SEQ ID NO: 8810 - DNA, 36 bp, synthetic construct
  misc_feature 1..36: note = Synthetic construct
  source 1..36: mol_type = other DNA
tgtcaacaatatgaaattctgcctcggttcactttc

SEQ ID NO: 8811 - DNA, 33 bp, synthetic construct
  misc_feature 1..33: note = Synthetic construct
  source 1..33: mol_type = other DNA
tgccaacagtataatagttaccctttcactttc

SEQ ID NO: 8812 - DNA, 36 bp, synthetic construct
  misc_feature 1..36: note = Synthetic construct
  source 1..36: mol_type = other DNA
tgtcagcagtataagaactggcctccgaacactttt

SEQ ID NO: 8813 - DNA, 33 bp, synthetic construct
  misc_feature 1..33: note = Synthetic construct
  source 1..33: mol_type = other DNA
tgtcagcagtatggtaactcacagatcacgttc

SEQ ID NO: 8814 - DNA, 33 bp, synthetic construct
  misc_feature 1..33: note = Synthetic construct
  source 1..33: mol_type = other DNA
tgtcatcagagttatactttagcgaacactttt

SEQ ID NO: 8815 - DNA, 33 bp, synthetic construct
  misc_feature 1..33: note = Synthetic construct
  source 1..33: mol_type = other DNA
tgtcaacaggctaacagtttcccaatcaccttc

SEQ ID NO: 8816 - DNA, 39 bp, synthetic construct
  misc_feature 1..39: note = Synthetic construct
  source 1..39: mol_type = other DNA
tgtcaacagagttacagtgcccctccggtgtacagtttt

SEQ ID NO: 8817 - DNA, 33 bp, synthetic construct
  misc_feature 1..33: note = Synthetic construct
  source 1..33: mol_type = other DNA
tgtcagcagtatggtacctcacctctgacgttc

SEQ ID NO: 8818 - DNA, 33 bp, synthetic construct
  misc_feature 1..33: note = Synthetic construct
  source 1..33: mol_type = other DNA
tgtcagcaatattttggtactcctctcactttc

SEQ ID NO: 8819 - DNA, 30 bp, synthetic construct
  misc_feature 1..30: note = Synthetic construct
  source 1..30: mol_type = other DNA
tgccaacagtataatagttatccgacgttc

SEQ ID NO: 8820 - DNA, 36 bp, synthetic construct
  misc_feature 1..36: note = Synthetic construct
  source 1..36: mol_type = other DNA
tgctgctcatatgcaggtagtagcactttcgtcttc

SEQ ID NO: 8821 - DNA, 33 bp, synthetic construct
  misc_feature 1..33: note = Synthetic construct
  source 1..33: mol_type = other DNA
tgtctacagcataatagttatccgtggacgttc

SEQ ID NO: 8822 - DNA, 33 bp, synthetic construct
  misc_feature 1..33: note = Synthetic construct
  source 1..33: mol_type = other DNA
tgtcaggcgtgggacacaagcgctgcgattttc

SEQ ID NO: 8823 - DNA, 36 bp, synthetic construct
  misc_feature 1..36: note = Synthetic construct
  source 1..36: mol_type = other DNA
tgtaactcccgttacagcagtgcttaccaggtgttc

SEQ ID NO: 8824 - DNA, 33 bp, synthetic construct
  misc_feature 1..33: note = Synthetic construct
  source 1..33: mol_type = other DNA
tgtcagcagtgtgataatctccctttcactttc

SEQ ID NO: 8825 - DNA, 33 bp, synthetic construct
  misc_feature 1..33: note = Synthetic construct
  source 1..33: mol_type = other DNA
tgccaacaatataatagtttcccgtacactttt

SEQ ID NO: 8826 - DNA, 33 bp, synthetic construct
  misc_feature 1..33: note = Synthetic construct
  source 1..33: mol_type = other DNA
tgcatgcaagatgcacaggatctgtggacgttc

SEQ ID NO: 8827 - DNA, 36 bp, synthetic construct
  misc_feature 1..36: note = Synthetic construct
  source 1..36: mol_type = other DNA
tgtcagcaatattatagtactcttccgtcgacgttc

SEQ ID NO: 8828 - DNA, 33 bp, synthetic construct
  misc_feature 1..33: note = Synthetic construct
  source 1..33: mol_type = other DNA
tgtcagtcttacgatagcatctcttgggtgttc

SEQ ID NO: 8829 - DNA, 33 bp, synthetic construct
  misc_feature 1..33: note = Synthetic construct
  source 1..33: mol_type = other DNA
tgcatgcaaggtacacactggccccggacgttc

SEQ ID NO: 8830 - DNA, 39 bp, synthetic construct
  misc_feature 1..39: note = Synthetic construct
  source 1..39: mol_type = other DNA
tgcggcacatgggatagcagcctgggaggtgtggtcttc

SEQ ID NO: 8831 - DNA, 36 bp, synthetic construct
  misc_feature 1..36: note = Synthetic construct
  source 1..36: mol_type = other DNA
tgtcagcagcgtagcaactggcctccgctcactttc

SEQ ID NO: 8832 - DNA, 33 bp, synthetic construct
  misc_feature 1..33: note = Synthetic construct
  source 1..33: mol_type = other DNA
tgtcagacctggggcactggcattcatgtcttc

SEQ ID NO: 8833 - DNA, 36 bp, synthetic construct
  misc_feature 1..36: note = Synthetic construct
  source 1..36: mol_type = other DNA
tgcagctcatatacaagcagcagcactcaggtcttc

SEQ ID NO: 8834 - DNA, 33 bp, synthetic construct
  misc_feature 1..33: note = Synthetic construct
  source 1..33: mol_type = other DNA
tgtcaacagtattatagttacccattcactttc

SEQ ID NO: 8835 - DNA, 39 bp, synthetic construct
  misc_feature 1..39: note = Synthetic construct
  source 1..39: mol_type = other DNA
tgcacctcatatacaaacaacaccaattctcaggtattc

SEQ ID NO: 8836 - DNA, 33 bp, synthetic construct
  misc_feature 1..33: note = Synthetic construct
  source 1..33: mol_type = other DNA
tgtcaacagagttacagtaccccccggacgttc

SEQ ID NO: 8837 - DNA, 36 bp, synthetic construct
  misc_feature 1..36: note = Synthetic construct
  source 1..36: mol_type = other DNA
tgccaacagtataatagttattccctggggactttt

SEQ ID NO: 8838 - DNA, 36 bp, synthetic construct
  misc_feature 1..36: note = Synthetic construct
  source 1..36: mol_type = other DNA
tgctgctcatatgcaggtaataatatcccgctattc

SEQ ID NO: 8839 - DNA, 36 bp, synthetic construct
  misc_feature 1..36: note = Synthetic construct
  source 1..36: mol_type = other DNA
tgcatgcaaggtacacactggcctccgctcactttc

SEQ ID NO: 8840 - DNA, 36 bp, synthetic construct
  misc_feature 1..36: note = Synthetic construct
  source 1..36: mol_type = other DNA
tgccagtcctatgacagcagcctgagtggagtcttc

SEQ ID NO: 8841 - DNA, 33 bp, synthetic construct
  misc_feature 1..33: note = Synthetic construct
  source 1..33: mol_type = other DNA
tgtcagcaatattatagtacttcgtacactttt

SEQ ID NO: 8842 - DNA, 36 bp, synthetic construct
  misc_feature 1..36: note = Synthetic construct
  source 1..36: mol_type = other DNA
tgcagctcatatacaatccgcagcacccatgtcttc

SEQ ID NO: 8843 - DNA, 33 bp, synthetic construct
  misc_feature 1..33: note = Synthetic construct
  source 1..33: mol_type = other DNA
tgtcagcaatatggtagccctccgtggacgttc

SEQ ID NO: 8844 - DNA, 33 bp, synthetic construct
  misc_feature 1..33: note = Synthetic construct
  source 1..33: mol_type = other DNA
tgccaacagtatgatagttatccggaaacgttc

SEQ ID NO: 8845 - DNA, 33 bp, synthetic construct
  misc_feature 1..33: note = Synthetic construct
  source 1..33: mol_type = other DNA
tgtcagacctggggcactggcccttgggtgttc

SEQ ID NO: 8846 - DNA, 33 bp, synthetic construct
  misc_feature 1..33: note = Synthetic construct
  source 1..33: mol_type = other DNA
tgtcagcagcgtagcaactggcctctcactttc

SEQ ID NO: 8847 - DNA, 33 bp, synthetic construct; identical to SEQ ID NO: 1837
  misc_feature 1..33: note = Synthetic construct
  source 1..33: mol_type = other DNA

SEQ ID NO: 8848 - DNA, 33 bp, synthetic construct
  misc_feature 1..33: note = Synthetic construct
  source 1..33: mol_type = other DNA
tgtcagcagtatcataactcactggacactttt

SEQ ID NO: 8849 - DNA, 33 bp, synthetic construct
  misc_feature 1..33: note = Synthetic construct
  source 1..33: mol_type = other DNA
tgtcagcaatattatactactccgtggacgttc

SEQ ID NO: 8850 - DNA, 39 bp, synthetic construct
  misc_feature 1..39: note = Synthetic construct
  source 1..39: mol_type = other DNA
tgtcagcagtatggtagctcacctccggcattcactttc

SEQ ID NO: 8851 - DNA, 36 bp, synthetic construct
  misc_feature 1..36: note = Synthetic construct
  source 1..36: mol_type = other DNA
tgtgtgctctttgtgggtggtggcatttggctattc

SEQ ID NO: 8852 - DNA, 33 bp, synthetic construct
  misc_feature 1..33: note = Synthetic construct
  source 1..33: mol_type = other DNA
tgcatgcagggtgcacactggccgtacactttt

SEQ ID NO: 8853 - DNA, 36 bp, synthetic construct
  misc_feature 1..36: note = Synthetic construct
  source 1..36: mol_type = other DNA
tgtgtgctttatatgactagtggcattgtgctattc

SEQ ID NO: 8854 - DNA, 33 bp, synthetic construct
  misc_feature 1..33: note = Synthetic construct
  source 1..33: mol_type = other DNA
tgttactctgcggctgacaacaatctggtattc

SEQ ID NO: 8855 - DNA, 33 bp, synthetic construct
  misc_feature 1..33: note = Synthetic construct
  source 1..33: mol_type = other DNA
tgcatgcaagctctacaaactcctttcactttc

SEQ ID NO: 8856 - DNA, 33 bp, synthetic construct
  misc_feature 1..33: note = Synthetic construct
  source 1..33: mol_type = other DNA
tgcatgcaagctctacaaactccttgggctttt

SEQ ID NO: 8857 - DNA, 33 bp, synthetic construct
  misc_feature 1..33: note = Synthetic construct
  source 1..33: mol_type = other DNA
tgtcaacagtatgatgatctccctctcactttc

SEQ ID NO: 8858 - DNA, 33 bp, synthetic construct
  misc_feature 1..33: note = Synthetic construct
  source 1..33: mol_type = other DNA
tgtcaacagtatgataatatccctctgacgttc

SEQ ID NO: 8859 - DNA, 33 bp, synthetic construct
  misc_feature 1..33: note = Synthetic construct
  source 1..33: mol_type = other DNA
tgtcgacagacttacagtaccccgtacactttt

SEQ ID NO: 8860 - DNA, 33 bp, synthetic construct
  misc_feature 1..33: note = Synthetic construct
  source 1..33: mol_type = other DNA
tgtcagcagcgtatcaactggccgctcaccttc

SEQ ID NO: 8861 - DNA, 33 bp, synthetic construct
  misc_feature 1..33: note = Synthetic construct
  source 1..33: mol_type = other DNA
tgtcaacagagttacagtacccctccaagtttc

SEQ ID NO: 8862 - DNA, 33 bp, synthetic construct
  misc_feature 1..33: note = Synthetic construct
  source 1..33: mol_type = other DNA
tgcatgcagggcacacactggccttggacgttc

SEQ ID NO: 8863 - DNA, 39 bp, synthetic construct
  misc_feature 1..39: note = Synthetic construct
  source 1..39: mol_type = other DNA
tgtcaggtctgggattttaatagtgatcatgcactgttc

SEQ ID NO: 8864 - DNA, 36 bp, synthetic construct
  misc_feature 1..36: note = Synthetic construct
  source 1..36: mol_type = other DNA
tgtcagtcttatgataacaattttgattgggttttc

SEQ ID NO: 8865 - DNA, 24 bp, synthetic construct
  misc_feature 1..24: note = Synthetic construct
  source 1..24: mol_type = other DNA
tgccaataccccccgaggacgttc

SEQ ID NO: 8866 - DNA, 36 bp, synthetic construct
  misc_feature 1..36: note = Synthetic construct
  source 1..36: mol_type = other DNA
tgtcagcactataacattgggcacggccacactttt

SEQ ID NO: 8867 - DNA, 33 bp, synthetic construct
  misc_feature 1..33: note = Synthetic construct
  source 1..33: mol_type = other DNA
tgtcagcaatattatagtgccccgtggacgttc

SEQ ID NO: 8868 - DNA, 42 bp, synthetic construct
  misc_feature 1..42: note = Synthetic construct
  source 1..42: mol_type = other DNA
tgtcaggtgtgggacattagtgatgagcatccttatgtcttc

SEQ ID NO: 8869 - DNA, 33 bp, synthetic construct
  misc_feature 1..33: note = Synthetic construct
  source 1..33: mol_type = other DNA
tgtcaacagggttacagtaccccgttcaccttc

SEQ ID NO: 8870 - DNA, 33 bp, synthetic construct
  misc_feature 1..33: note = Synthetic construct
  source 1..33: mol_type = other DNA
tgtcagtcttattatggcggcaatcaggtgttc

SEQ ID NO: 8871 - DNA, 39 bp, synthetic construct
  misc_feature 1..39: note = Synthetic construct
  source 1..39: mol_type = other DNA
tgtggtacatggcacagcaactctaagactcgagtgttc

SEQ ID NO: 8872 - DNA, 39 bp, synthetic construct
  misc_feature 1..39: note = Synthetic construct
  source 1..39: mol_type = other DNA
tgtgcagcttgggatgacagcctgaatggtgtagtcttc

SEQ ID NO: 8873 - DNA, 36 bp, synthetic construct
  misc_feature 1..36: note = Synthetic construct
  source 1..36: mol_type = other DNA
tgtcaacagtattataatttcctccctctcactttc

SEQ ID NO: 8874 - DNA, 33 bp, synthetic construct
  misc_feature 1..33: note = Synthetic construct
  source 1..33: mol_type = other DNA
tgtcagcagtatggtacctcactgttcactttt

SEQ ID NO: 8875 - DNA, 42 bp, synthetic construct
  misc_feature 1..42: note = Synthetic construct
  source 1..42: mol_type = other DNA
tgcggaacatgggatagcagcctgagtgcaccttgggtgttc

SEQ ID NO: 8876 - DNA, 33 bp, synthetic construct
  misc_feature 1..33: note = Synthetic construct
  source 1..33: mol_type = other DNA
tgtctgcaggctaacactatgcctctcactttc

SEQ ID NO: 8877 - DNA, 36 bp, synthetic construct
  misc_feature 1..36: note = Synthetic construct
  source 1..36: mol_type = other DNA
tgtcaacaatattatactacttctgctctcactttc

SEQ ID NO: 8878 - DNA, 36 bp, synthetic construct
  misc_feature 1..36: note = Synthetic construct
  source 1..36: mol_type = other DNA
tgtcagtcttttgatagcacttctcactgggtgttc

SEQ ID NO: 8879 - DNA, 39 bp, synthetic construct
  misc_feature 1..39: note = Synthetic construct
  source 1..39: mol_type = other DNA
tgtcaagtttacgataggaatactgatcaatgggtattc

SEQ ID NO: 8880 - DNA, 39 bp, synthetic construct
  misc_feature 1..39: note = Synthetic construct
  source 1..39: mol_type = other DNA
tgtaactcccgggacagcagtggtaaccatcaggtcttc

SEQ ID NO: 8881 - DNA, 33 bp, synthetic construct
  misc_feature 1..33: note = Synthetic construct
  source 1..33: mol_type = other DNA
tgccaacagtatcatacttcttcggaaaccttc

SEQ ID NO: 8882 - DNA, 36 bp, synthetic construct
  misc_feature 1..36: note = Synthetic construct
  source 1..36: mol_type = other DNA
tgccaacaatactatactttttcttcgtggacgttc

SEQ ID NO: 8883 - DNA, 30 bp, synthetic construct
  misc_feature 1..30: note = Synthetic construct
  source 1..30: mol_type = other DNA
tgccaacagtatgataatttgtggtcgttc

SEQ ID NO: 8884 - DNA, 36 bp, synthetic construct
  misc_feature 1..36: note = Synthetic construct
  source 1..36: mol_type = other DNA
tgcatgcaaggaacacactggcctccgtggacgttc

SEQ ID NO: 8885 - DNA, 36 bp, synthetic construct
  misc_feature 1..36: note = Synthetic construct
  source 1..36: mol_type = other DNA
tgccaacagtataatacttattcggggtggacgttc

SEQ ID NO: 8886 - DNA, 33 bp, synthetic construct
  misc_feature 1..33: note = Synthetic construct
  source 1..33: mol_type = other DNA
tgtctacagtacaaaaattaccctcgcacgttc

SEQ ID NO: 8887 - DNA, 36 bp, synthetic construct
  misc_feature 1..36: note = Synthetic construct
  source 1..36: mol_type = other DNA
tgtcaatcagcggacagcagtggtacttgggtcttt

SEQ ID NO: 8888 - DNA, 39 bp, synthetic construct
  misc_feature 1..39: note = Synthetic construct
  source 1..39: mol_type = other DNA
tgtcagtcgcatgacagcagcctgactaatttcatcttt

SEQ ID NO: 8889 - DNA, 30 bp, synthetic construct
  misc_feature 1..30: note = Synthetic construct
  source 1..30: mol_type = other DNA
tgtcagcagcgtaccgactggtacactttt

SEQ ID NO: 8890 - DNA, 33 bp, synthetic construct
  misc_feature 1..33: note = Synthetic construct
  source 1..33: mol_type = other DNA
tgtcaacagacttacagtatcccattcactttc

SEQ ID NO: 8891 - DNA, 39 bp, synthetic construct
  misc_feature 1..39: note = Synthetic construct
  source 1..39: mol_type = other DNA
ttcacctcatatacaaacgacagcaattctcaggtattc

SEQ ID NO: 8892 - DNA, 36 bp, synthetic construct
  misc_feature 1..36: note = Synthetic construct
  source 1..36: mol_type = other DNA
tgtcagcagcgtgtcaactggccgtatctcactttc

SEQ ID NO: 8893 - DNA, 36 bp, synthetic construct
  misc_feature 1..36: note = Synthetic construct
  source 1..36: mol_type = other DNA
tgcagctcatatacaagcagcagcacttttgtcttc

SEQ ID NO: 8894 - DNA, 33 bp, synthetic construct
  misc_feature 1..33: note = Synthetic construct
  source 1..33: mol_type = other DNA
tgccaacaatatgaaagttacccgtacactttt

SEQ ID NO: 8895 - DNA, 33 bp, synthetic construct
  misc_feature 1..33: note = Synthetic construct
  source 1..33: mol_type = other DNA
tgcatgcaagcttcacaatttcctctcactttc

SEQ ID NO: 8896 - DNA, 36 bp, synthetic construct
  misc_feature 1..36: note = Synthetic construct
  source 1..36: mol_type = other DNA
tgtcagcagtatgataagtggcctccgtggacgttc

SEQ ID NO: 8897 - DNA, 36 bp, synthetic construct
  misc_feature 1..36: note = Synthetic construct
  source 1..36: mol_type = other DNA
tgcagctcatatacaagcatcagcactgtggtattc

SEQ ID NO: 8898 - DNA, 36 bp, synthetic construct
  misc_feature 1..36: note = Synthetic construct
  source 1..36: mol_type = other DNA
tgtcaacagtataattattggcctccgtacactttt

SEQ ID NO: 8899 - DNA, 33 bp, synthetic construct
  misc_feature 1..33: note = Synthetic construct
  source 1..33: mol_type = other DNA
tgcatgcaagctctacaaactccgtacactttt

SEQ ID NO: 8900 - DNA, 33 bp, synthetic construct
  misc_feature 1..33: note = Synthetic construct
  source 1..33: mol_type = other DNA
tgtcagcagcgtagcagctggcctctcactttc

SEQ ID NO: 8901 - DNA, 36 bp, synthetic construct
  misc_feature 1..36: note = Synthetic construct
  source 1..36: mol_type = other DNA
tgcaactcatatacaaacagcagcactctggtgttc

SEQ ID NO: 8902 - DNA, 39 bp, synthetic construct
  misc_feature 1..39: note = Synthetic construct
  source 1..39: mol_type = other DNA
tgcggaacatgggatagcagcctgagtgcttatgtcttc

SEQ ID NO: 8903 - DNA, 36 bp, synthetic construct
  misc_feature 1..36: note = Synthetic construct
  source 1..36: mol_type = other DNA
tgtcaacagagttacagtacccctcggagcaccttc

SEQ ID NO: 8904 - DNA, 30 bp, synthetic construct
  misc_feature 1..30: note = Synthetic construct
  source 1..30: mol_type = other DNA
tgtcagcagcgtagcaactggcctcttttc

SEQ ID NO: 8905 - DNA, 39 bp, synthetic construct
  misc_feature 1..39: note = Synthetic construct
  source 1..39: mol_type = other DNA
tgtcaggcgtgggacagcagcactgccccttatgtcttc

SEQ ID NO: 8906 - DNA, 36 bp, synthetic construct
  misc_feature 1..36: note = Synthetic construct
  source 1..36: mol_type = other DNA
tgcagctcatatacaagcagcagcacttgggtgttc

SEQ ID NO: 8907 - DNA, 33 bp, synthetic construct
  misc_feature 1..33: note = Synthetic construct
  source 1..33: mol_type = other DNA
tgtcaacagggtaccagtttccccttcactttc

SEQ ID NO: 8908 - DNA, 39 bp, synthetic construct
  misc_feature 1..39: note = Synthetic construct
  source 1..39: mol_type = other DNA
tgtcagttgtgggatagtcgtagtgatcatgtggtattc

SEQ ID NO: 8909 - DNA, 24 bp, synthetic construct
  misc_feature 1..24: note = Synthetic construct
  source 1..24: mol_type = other DNA
tgtcagcagcgtgacttcactttc

SEQ ID NO: 8910 - DNA, 33 bp, synthetic construct
  misc_feature 1..33: note = Synthetic construct
  source 1..33: mol_type = other DNA
tgtcaacaggttaatgcttaccccttcagtttc

SEQ ID NO: 8911 - DNA, 33 bp, synthetic construct
  misc_feature 1..33: note = Synthetic construct
  source 1..33: mol_type = other DNA
tgtcaccagtatgataactggcctctcactttc

SEQ ID NO: 8912 - DNA, 36 bp, synthetic construct
  misc_feature 1..36: note = Synthetic construct
  source 1..36: mol_type = other DNA
tgtcagtcttgtgataacaacaatcatggagtcttc

SEQ ID NO: 8913 - DNA, 33 bp, synthetic construct
  misc_feature 1..33: note = Synthetic construct
  source 1..33: mol_type = other DNA
tgtcagcagtattatgatgaccccctcactttc

SEQ ID NO: 8914 - DNA, 39 bp, synthetic construct
  misc_feature 1..39: note = Synthetic construct
  source 1..39: mol_type = other DNA
tgcggaacatgggatagcagcctgagtgctgaggtcttc

SEQ ID NO: 8915 - DNA, 33 bp, synthetic construct
  misc_feature 1..33: note = Synthetic construct
  source 1..33: mol_type = other DNA
tgtcagcagtattacacttcccctctgactttc

SEQ ID NO: 8916 - DNA, 33 bp, synthetic construct
  misc_feature 1..33: note = Synthetic construct
  source 1..33: mol_type = other DNA
tgtcaggcgtgggacagcagcactgccgttttc

SEQ ID NO: 8917 - DNA, 36 bp, synthetic construct
  misc_feature 1..36: note = Synthetic construct
  source 1..36: mol_type = other DNA
tgccaacagtataatagttattttccttggacgttc

SEQ ID NO: 8918 - DNA, 33 bp, synthetic construct
  misc_feature 1..33: note = Synthetic construct
  source 1..33: mol_type = other DNA
tgtcaacagagttttagtaggcctccaactttc

SEQ ID NO: 8919 - DNA, 36 bp, synthetic construct
  misc_feature 1..36: note = Synthetic construct
  source 1..36: mol_type = other DNA
tgctgctcatatgcaggtagtagaacttctttcttc

SEQ ID NO: 8920 - DNA, 33 bp, synthetic construct
  misc_feature 1..33: note = Synthetic construct
  source 1..33: mol_type = other DNA
tgtcagcagcgtggcaactggccgatcaccttc

SEQ ID NO: 8921 - DNA, 39 bp, synthetic construct
  misc_feature 1..39: note = Synthetic construct
  source 1..39: mol_type = other DNA
tgcacctcatatacaaacaacagctattctcaggtattc

SEQ ID NO: 8922 - DNA, 33 bp, synthetic construct
  misc_feature 1..33: note = Synthetic construct
  source 1..33: mol_type = other DNA
tgtcaacagagttacagtgcccctcgtactttt

SEQ ID NO: 8923 - DNA, 42 bp, synthetic construct
  misc_feature 1..42: note = Synthetic construct
  source 1..42: mol_type = other DNA
tgcggaacatgggataacagcctgagtgctggctatgtcttc

SEQ ID NO: 8924 - DNA, 33 bp, synthetic construct
  misc_feature 1..33: note = Synthetic construct
  source 1..33: mol_type = other DNA
tgtcagcaatattatactactcctctgacgttc

SEQ ID NO: 8925 - DNA, 36 bp, synthetic construct
  misc_feature 1..36: note = Synthetic construct
  source 1..36: mol_type = other DNA
tgcatctcatatacaactagcagcacttgggtgttc

SEQ ID NO: 8926 - DNA, 33 bp, synthetic construct
  misc_feature 1..33: note = Synthetic construct
  source 1..33: mol_type = other DNA
tgtcaaacgtgggacagcaccactgcggtgttc

SEQ ID NO: 8927 - DNA, 33 bp, synthetic construct
  misc_feature 1..33: note = Synthetic construct
  source 1..33: mol_type = other DNA
tgcatgcaaggttcacactggccattcactttc

SEQ ID NO: 8928 - DNA, 33 bp, synthetic construct
  misc_feature 1..33: note = Synthetic construct
  source 1..33: mol_type = other DNA
tgtcagcaatattatagtactctgtacactttt

SEQ ID NO: 8929 - DNA, 33 bp, synthetic construct
  misc_feature 1..33: note = Synthetic construct
  source 1..33: mol_type = other DNA
tgtcagcagcgtagcaactggccttggactttt

SEQ ID NO: 8930 - DNA, 30 bp, synthetic construct
  misc_feature 1..30: note = Synthetic construct
  source 1..30: mol_type = other DNA
tgtcagcaatattatagttctatcaccttc

SEQ ID NO: 8931 - DNA, 39 bp, synthetic construct
  misc_feature 1..39: note = Synthetic construct
  source 1..39: mol_type = other DNA
tgtcaatcagcagacagcagtggtactttcgtggtattc

SEQ ID NO: 8932 - DNA, 33 bp, synthetic construct
  misc_feature 1..33: note = Synthetic construct
  source 1..33: mol_type = other DNA
tgtcagcaatattatagtactccattcactttc

SEQ ID NO: 8933 - DNA, 33 bp, synthetic construct
  misc_feature 1..33: note = Synthetic construct
  source 1..33: mol_type = other DNA
tgtcagcagtataataactggcccctcactttc

SEQ ID NO: 8934 - DNA, 33 bp, synthetic construct
  misc_feature 1..33: note = Synthetic construct
  source 1..33: mol_type = other DNA
tgtcaacagtatgataatctccctcaaactttt

SEQ ID NO: 8935 - DNA, 36 bp, synthetic construct
  misc_feature 1..36: note = Synthetic construct
  source 1..36: mol_type = other DNA
tgtcaatcagcagacagcagtggtacttatgtcttc

SEQ ID NO: 8936 - DNA, 36 bp, synthetic construct
  misc_feature 1..36: note = Synthetic construct
  source 1..36: mol_type = other DNA
tgtcaacagtatgataatctccctccgctcactttc

SEQ ID NO: 8937 - DNA, 33 bp, synthetic construct
  misc_feature 1..33: note = Synthetic construct
  source 1..33: mol_type = other DNA
tgtcaacagtatgataatctccctctcactttc

SEQ ID NO: 8938 - DNA, 36 bp, synthetic construct
  misc_feature 1..36: note = Synthetic construct
  source 1..36: mol_type = other DNA
tgtcagcagtatgataactggcctccgatcaccttc

SEQ ID NO: 8939 - DNA, 33 bp, synthetic construct
  misc_feature 1..33: note = Synthetic construct
  source 1..33: mol_type = other DNA
tgtgtgctgtatctgggtactgtcgtgctcttc

SEQ ID NO: 8940 - DNA, 30 bp, synthetic construct
  misc_feature 1..30: note = Synthetic construct
  source 1..30: mol_type = other DNA
tgccaacaatatgatactctgtggacgttc

SEQ ID NO: 8941 - DNA, 33 bp, synthetic construct
  misc_feature 1..33: note = Synthetic construct
  source 1..33: mol_type = other DNA
tgtcaaaagtataacagtgccccgtacactttt

SEQ ID NO: 8942 - DNA, 33 bp, synthetic construct
  misc_feature 1..33: note = Synthetic construct
  source 1..33: mol_type = other DNA
tgcctgctctcctatagtgatactcgggtcttc

SEQ ID NO: 8943 - DNA, 30 bp, synthetic construct
  misc_feature 1..30: note = Synthetic construct
  source 1..30: mol_type = other DNA
tgtcagcaatttcatacttcttggacgttc

SEQ ID NO: 8944 - DNA, 39 bp, synthetic construct
  misc_feature 1..39: note = Synthetic construct
  source 1..39: mol_type = other DNA
tgtcaatcagcagacagcagtggtacttattgggtgttc

SEQ ID NO: 8945 - DNA, 36 bp, synthetic construct
  misc_feature 1..36: note = Synthetic construct
  source 1..36: mol_type = other DNA
tgcatgcaagatgcacaagatcctccgtacactttt

SEQ ID NO: 8946 - DNA, 33 bp, synthetic construct
  misc_feature 1..33: note = Synthetic construct
  source 1..33: mol_type = other DNA
tgtcaacagagttacagtagtcctcggacgttc

SEQ ID NO: 8947 - DNA, 33 bp, synthetic construct
  misc_feature 1..33: note = Synthetic construct
  source 1..33: mol_type = other DNA
tgtcaacaggccagcagtttcccattcactttc

SEQ ID NO: 8948 - DNA, 33 bp, synthetic construct
  misc_feature 1..33: note = Synthetic construct
  source 1..33: mol_type = other DNA
tgtcaacagagttacagtaccccattcactttc

SEQ ID NO: 8949 - DNA, 33 bp, synthetic construct
  misc_feature 1..33: note = Synthetic construct
  source 1..33: mol_type = other DNA
tgtcagcagtattctagtactccattcactttc

SEQ ID NO: 8950 - DNA, 36 bp, synthetic construct
  misc_feature 1..36: note = Synthetic construct
  source 1..36: mol_type = other DNA
tgcaactcatatgcaggcagcgacaattgggtgttc

SEQ ID NO: 8951 - DNA, 30 bp, synthetic construct
  misc_feature 1..30: note = Synthetic construct
  source 1..30: mol_type = other DNA
tgtcagcagtatcatttctggccttcgttc

SEQ ID NO: 8952 - DNA, 39 bp, synthetic construct
  misc_feature 1..39: note = Synthetic construct
  source 1..39: mol_type = other DNA
tgtgcagcatgggatgacagcctgagtggttgggtgttc

SEQ ID NO: 8953 - DNA, 33 bp, synthetic construct
  misc_feature 1..33: note = Synthetic construct
  source 1..33: mol_type = other DNA
tgcatgcaagctctacaaacccagatcaccttc

SEQ ID NO: 8954 - DNA, 36 bp, synthetic construct
  misc_feature 1..36: note = Synthetic construct
  source 1..36: mol_type = other DNA
tgtcagcagtatggtagctcaccgcagatcaccttc

SEQ ID NO: 8955 - DNA, 36 bp, synthetic construct
  misc_feature 1..36: note = Synthetic construct
  source 1..36: mol_type = other DNA
tgcagctcatatgcaagcgacaccagtctggtgttc

SEQ ID NO: 8956 - DNA, 33 bp, synthetic construct
  misc_feature 1..33: note = Synthetic construct
  source 1..33: mol_type = other DNA
tgtcagcagtatggtagctcactgtggacgttc

SEQ ID NO: 8957 - DNA, 33 bp, synthetic construct
  misc_feature 1..33: note = Synthetic construct
  source 1..33: mol_type = other DNA
tgccagcaatttaatctttatcccctcactttc

SEQ ID NO: 8958 - DNA, 39 bp, synthetic construct
  misc_feature 1..39: note = Synthetic construct
  source 1..39: mol_type = other DNA
tgtaactcccgggacagcagtggtaaccatgtggtattc

SEQ ID NO: 8959 - DNA, 39 bp, synthetic construct
  misc_feature 1..39: note = Synthetic construct
  source 1..39: mol_type = other DNA
tgtgcagcatgggatgacagcctgaatggtgtggtattc

SEQ ID NO: 8960 - DNA, 39 bp, synthetic construct
  misc_feature 1..39: note = Synthetic construct
  source 1..39: mol_type = other DNA
tgcaactcatacacaagcaccaccactcttgtacttttc

SEQ ID NO: 8961 - DNA, 33 bp, synthetic construct
  misc_feature 1..33: note = Synthetic construct
  source 1..33: mol_type = other DNA
tgtcaccagtatggtgactcaccgtggacgttc

SEQ ID NO: 8962 - DNA, 33 bp, synthetic construct
  misc_feature 1..33: note = Synthetic construct
  source 1..33: mol_type = other DNA
tgtcaacagtataatgcttatccgatcaccttc

SEQ ID NO: 8963 - DNA, 39 bp, synthetic construct
  misc_feature 1..39: note = Synthetic construct
  source 1..39: mol_type = other DNA
tgtcaggtgtgggatactgcttctgatcattatgtcttc

SEQ ID NO: 8964 - DNA, 33 bp, synthetic construct
  misc_feature 1..33: note = Synthetic construct
  source 1..33: mol_type = other DNA
tgtcagcagtataataactggccccggacgttc

SEQ ID NO: 8965 - DNA, 36 bp, synthetic construct
  misc_feature 1..36: note = Synthetic construct
  source 1..36: mol_type = other DNA
tgtcagcagtacaataattggcctccttacactttt

SEQ ID NO: 8966 - DNA, 33 bp, synthetic construct
  misc_feature 1..33: note = Synthetic construct
  source 1..33: mol_type = other DNA
tgctgctcatatgcaggcgctacttatgtcttc

SEQ ID NO: 8967 - DNA, 33 bp, synthetic construct
  misc_feature 1..33: note = Synthetic construct
  source 1..33: mol_type = other DNA
tgtcagcaatattatactactcccctcactttc

SEQ ID NO: 8968 - DNA, 39 bp, synthetic construct
  misc_feature 1..39: note = Synthetic construct
  source 1..39: mol_type = other DNA
tgtcaggtgtgggacagtattagtaatcaggtgattttc

SEQ ID NO: 8969 - DNA, 36 bp, synthetic construct
  misc_feature 1..36: note = Synthetic construct
  source 1..36: mol_type = other DNA
tgtcagcagtatcatgcgtggcccccgctcaccttc

SEQ ID NO: 8970 - DNA, 39 bp, synthetic construct
  misc_feature 1..39: note = Synthetic construct
  source 1..39: mol_type = other DNA
tgtcagcagtacagtaagtggcctccggggttcactttc

SEQ ID NO: 8971 - DNA, 39 bp, synthetic construct
  misc_feature 1..39: note = Synthetic construct
  source 1..39: mol_type = other DNA
tgtcaacagcgaagcaactggcctccgagtctcactttc

SEQ ID NO: 8972 - DNA, 30 bp, synthetic construct
  misc_feature 1..30: note = Synthetic construct
  source 1..30: mol_type = other DNA
tgtcagcagtacaatagagggtggacgttc

SEQ ID NO: 8973 - DNA, 33 bp, synthetic construct
  misc_feature 1..33: note = Synthetic construct
  source 1..33: mol_type = other DNA
tgtcaacagagttacaatatacccctcactttc

SEQ ID NO: 8974 - DNA, 39 bp, synthetic construct
  misc_feature 1..39: note = Synthetic construct
  source 1..39: mol_type = other DNA
tgcggaacatgggatagcagcctgagtgctggactcttc

SEQ ID NO: 8975 - DNA, 30 bp, synthetic construct; identical to SEQ ID NO: 1836
  misc_feature 1..30: note = Synthetic construct
  source 1..30: mol_type = other DNA

SEQ ID NO: 8976 - DNA, 33 bp, synthetic construct
  misc_feature 1..33: note = Synthetic construct
  source 1..33: mol_type = other DNA
tgccaacagtataatcattaccctttcaccttc

SEQ ID NO: 8977 - DNA, 33 bp, synthetic construct
  misc_feature 1..33: note = Synthetic construct
  source 1..33: mol_type = other DNA
tgtcaccagtattatagtactccgtccactttt

SEQ ID NO: 8978 - DNA, 33 bp, synthetic construct
  misc_feature 1..33: note = Synthetic construct
  source 1..33: mol_type = other DNA
tgccaacagtttaatagttacacgtggacgttc

SEQ ID NO: 8979 - DNA, 36 bp, synthetic construct
  misc_feature 1..36: note = Synthetic construct
  source 1..36: mol_type = other DNA
tgtcaggcgtgggacagcagttccctttatgtcttc

SEQ ID NO: 8980 - DNA, 39 bp, synthetic construct
  misc_feature 1..39: note = Synthetic construct
  source 1..39: mol_type = other DNA
tgtcaacaggggaccgactggcctcacctattcactttc

SEQ ID NO: 8981 - DNA, 30 bp, synthetic construct
  misc_feature 1..30: note = Synthetic construct
  source 1..30: mol_type = other DNA
tgtcagcagcatttcagctggatcaccttc

SEQ ID NO: 8982 - DNA, 33 bp, synthetic construct
  misc_feature 1..33: note = Synthetic construct
  source 1..33: mol_type = other DNA
tgtatgcagggcacacactggccgctcactttc

SEQ ID NO: 8983 - DNA, 33 bp, synthetic construct
  misc_feature 1..33: note = Synthetic construct
  source 1..33: mol_type = other DNA
tgtcaacagagtttcagaaccccgtacactttt

SEQ ID NO: 8984 - DNA, 39 bp, synthetic construct
  misc_feature 1..39: note = Synthetic construct
  source 1..39: mol_type = other DNA
tgtgccacatgggacgacagcctgactggctatgtcttc

SEQ ID NO: 8985 - DNA, 39 bp, synthetic construct
  misc_feature 1..39: note = Synthetic construct
  source 1..39: mol_type = other DNA
tgctcagcatgggacagcagcctcagtgcttgggtgttc

SEQ ID NO: 8986 - DNA, 33 bp, synthetic construct
  misc_feature 1..33: note = Synthetic construct
  source 1..33: mol_type = other DNA
tgtcaacagtatagtagttatccgttcacgttt

SEQ ID NO: 8987 - DNA, 39 bp, synthetic construct
  misc_feature 1..39: note = Synthetic construct
  source 1..39: mol_type = other DNA
tgctcttcatacataagaggcaccgcttcttttgtcttc

SEQ ID NO: 8988 - DNA, 36 bp, synthetic construct
  misc_feature 1..36: note = Synthetic construct
  source 1..36: mol_type = other DNA
tgtcagcactatagtgactggcctccggtaactttt

SEQ ID NO: 8989 - DNA, 33 bp, synthetic construct
  misc_feature 1..33: note = Synthetic construct
  source 1..33: mol_type = other DNA
tgcatgcaaactctccaagctccgtacactttt

SEQ ID NO: 8990 - DNA, 33 bp, synthetic construct
  misc_feature 1..33: note = Synthetic construct
  source 1..33: mol_type = other DNA
tgtcaacaggctaacagtttcccgatcaccttc

SEQ ID NO: 8991 - DNA, 36 bp, synthetic construct; identical to SEQ ID NO: 1839
  misc_feature 1..36: note = Synthetic construct
  source 1..36: mol_type = other DNA

SEQ ID NO: 8992 - DNA, 33 bp, synthetic construct
  misc_feature 1..33: note = Synthetic construct
  source 1..33: mol_type = other DNA
tgtctccagcacaatagtttcccgctcactttc

SEQ ID NO: 8993 - DNA, 33 bp, synthetic construct
  misc_feature 1..33: note = Synthetic construct
  source 1..33: mol_type = other DNA
tgtcaacagtatgaaaatctcccactcactttc

SEQ ID NO: 8994 - DNA, 30 bp, synthetic construct
  misc_feature 1..30: note = Synthetic construct
  source 1..30: mol_type = other DNA
tgcatgcaaggtctacaaactccgactttc

SEQ ID NO: 8995 - DNA, 33 bp, synthetic construct
  misc_feature 1..33: note = Synthetic construct
  source 1..33: mol_type = other DNA
tgtcagcaatattctagtactctttggacattc

SEQ ID NO: 8996 - DNA, 39 bp, synthetic construct
  misc_feature 1..39: note = Synthetic construct
  source 1..39: mol_type = other DNA
tgcagctcatatgcaaccagcgacaatttaagattgttt

SEQ ID NO: 8997 - DNA, 30 bp, synthetic construct
  misc_feature 1..30: note = Synthetic construct
  source 1..30: mol_type = other DNA
tgtcagcaatattttattactccgactttc

SEQ ID NO: 8998 - DNA, 36 bp, synthetic construct
  misc_feature 1..36: note = Synthetic construct
  source 1..36: mol_type = other DNA
tgccaagaatataatagttaccctatgtacactttt

SEQ ID NO: 8999 - DNA, 33 bp, synthetic construct
  misc_feature 1..33: note = Synthetic construct
  source 1..33: mol_type = other DNA
tgccaacagtacagtacttatttcgtcactttc

SEQ ID NO: 9000 - DNA, 33 bp, synthetic construct
  misc_feature 1..33: note = Synthetic construct
  source 1..33: mol_type = other DNA
tgtcaacagagttacagtcccccgttcactttt

SEQ ID NO: 9001 - DNA, 42 bp, synthetic construct
  misc_feature 1..42: note = Synthetic construct
  source 1..42: mol_type = other DNA
tgtcaggtgtgggatagtactggtgttcacccttttgtcttc

SEQ ID NO: 9002 - DNA, 39 bp, synthetic construct
  misc_feature 1..39: note = Synthetic construct
  source 1..39: mol_type = other DNA
tgcggaacgtgggatgacagcctgaatgctggcgtcttc

SEQ ID NO: 9003 - DNA, 33 bp, synthetic construct
  misc_feature 1..33: note = Synthetic construct
  source 1..33: mol_type = other DNA
tgtcagctgtattttggttcaggattcactttc

SEQ ID NO: 9004 - DNA, 33 bp, synthetic construct
  misc_feature 1..33: note = Synthetic construct
  source 1..33: mol_type = other DNA
tgtcagcagtatggcagatcccctcggacgttc

SEQ ID NO: 9005 - DNA, 33 bp, synthetic construct; identical to SEQ ID NO: 1835
  misc_feature 1..33: note = Synthetic construct
  source 1..33: mol_type = other DNA

SEQ ID NO: 9006 - DNA, 36 bp, synthetic construct
  misc_feature 1..36: note = Synthetic construct
  source 1..36: mol_type = other DNA
tgcagctcatatgcaggcactaacaattttgtcttc

SEQ ID NO: 9007 - DNA, 33 bp, synthetic construct
  misc_feature 1..33: note = Synthetic construct
  source 1..33: mol_type = other DNA
tgtcaacaatatggtaattcacctcagacgttc

SEQ ID NO: 9008 - DNA, 33 bp, synthetic construct
  misc_feature 1..33: note = Synthetic construct
  source 1..33: mol_type = other DNA
tgtcaccagtattatgcgaccccatacaccttt

SEQ ID NO: 9009 - DNA, 33 bp, synthetic construct
  misc_feature 1..33: note = Synthetic construct
  source 1..33: mol_type = other DNA
tgtcaacagagtttcagacccccgctcactttc

SEQ ID NO: 9010 - DNA, 36 bp, synthetic construct
  misc_feature 1..36: note = Synthetic construct
  source 1..36: mol_type = other DNA
tgtcagcagcgtagcagctggcctccgatcaccttc

SEQ ID NO: 9011 - DNA, 39 bp, synthetic construct
  misc_feature 1..39: note = Synthetic construct
  source 1..39: mol_type = other DNA
tgtcaggtgtgggatagtagtgttgatcccgtgatattc

SEQ ID NO: 9012 - DNA, 39 bp, synthetic construct
  misc_feature 1..39: note = Synthetic construct
  source 1..39: mol_type = other DNA
tgcggaacatgggatgctagcgtgagtgttgcggtattc

SEQ ID NO: 9013 - DNA, 39 bp, synthetic construct
  misc_feature 1..39: note = Synthetic construct
  source 1..39: mol_type = other DNA
tgcggagcatgggatagcagcctgaatgttgtggtgttc

SEQ ID NO: 9014 - DNA, 33 bp, synthetic construct
  misc_feature 1..33: note = Synthetic construct
  source 1..33: mol_type = other DNA
tgtcaacaatattataatattccttggacgttc

SEQ ID NO: 9015 - DNA, 39 bp, synthetic construct
  misc_feature 1..39: note = Synthetic construct
  source 1..39: mol_type = other DNA
tgtgcagcatgggatggcagcctgaatggttatgtcttc

SEQ ID NO: 9016 - DNA, 39 bp, synthetic construct
  misc_feature 1..39: note = Synthetic construct
  source 1..39: mol_type = other DNA
tgtcaacaatatgagaacatccctccggggctcacgttc

SEQ ID NO: 9017 - DNA, 39 bp, synthetic construct
  misc_feature 1..39: note = Synthetic construct
  source 1..39: mol_type = other DNA
tgcagctcatatgaaaccagcaacaatttgaggttattc

SEQ ID NO: 9018 - DNA, 33 bp, synthetic construct
  misc_feature 1..33: note = Synthetic construct
  source 1..33: mol_type = other DNA
tgtcagcagtatggtagctcacctgggacgttc

SEQ ID NO: 9019 - DNA, 33 bp, synthetic construct
  misc_feature 1..33: note = Synthetic construct
  source 1..33: mol_type = other DNA
tgtcagcagtatggcatctcaccgtacactttt

SEQ ID NO: 9020 - DNA, 36 bp, synthetic construct
  misc_feature 1..36: note = Synthetic construct
  source 1..36: mol_type = other DNA
tgcatgcaagatgcacaagatcccttgttcactttc

SEQ ID NO: 9021 - DNA, 33 bp, synthetic construct
  misc_feature 1..33: note = Synthetic construct
  source 1..33: mol_type = other DNA
tgtcagcagtctggtagctcaccgtacactttt

SEQ ID NO: 9022 - DNA, 33 bp, synthetic construct
  misc_feature 1..33: note = Synthetic construct
  source 1..33: mol_type = other DNA
tgtcaacaatattttcgtactcctccgactttc

SEQ ID NO: 9023 - DNA, 30 bp, synthetic construct
  misc_feature 1..30: note = Synthetic construct
  source 1..30: mol_type = other DNA
tgtcaacagagttacacttccctcactttc

SEQ ID NO: 9024 - DNA, 33 bp, synthetic construct
  misc_feature 1..33: note = Synthetic construct
  source 1..33: mol_type = other DNA
tgtcaacaggttgatgctgacccgatcaccttc

SEQ ID NO: 9025 - DNA, 39 bp, synthetic construct
  misc_feature 1..39: note = Synthetic construct
  source 1..39: mol_type = other DNA
tgcggaacatgggatagcagtttgagtggtggggtgttc

SEQ ID NO: 9026 - DNA, 39 bp, synthetic construct
  misc_feature 1..39: note = Synthetic construct
  source 1..39: mol_type = other DNA
tgcgcctcatataccgttagtagtagtctcgaggtcttc

SEQ ID NO: 9027 - DNA, 33 bp, synthetic construct
  misc_feature 1..33: note = Synthetic construct
  source 1..33: mol_type = other DNA
tgtcaacaagcaaacagtttccctcacacgttc

SEQ ID NO: 9028 - DNA, 39 bp, synthetic construct
  misc_feature 1..39: note = Synthetic construct
  source 1..39: mol_type = other DNA
tgtgcagcatgggatgacagcctgagtggtccggtattc

SEQ ID NO: 9029 - DNA, 33 bp, synthetic construct
  misc_feature 1..33: note = Synthetic construct
  source 1..33: mol_type = other DNA
tgcatgcaaaataaacaggtttccataaccttc

SEQ ID NO: 9030 - DNA, 39 bp, synthetic construct
  misc_feature 1..39: note = Synthetic construct
  source 1..39: mol_type = other DNA
tgcggaacatgggataacagcctgagtgcttgggtgttc

SEQ ID NO: 9031 - DNA, 39 bp, synthetic construct
  misc_feature 1..39: note = Synthetic construct
  source 1..39: mol_type = other DNA
tgtgcagcatgggatgacagcctgaatggttatgtcttc

SEQ ID NO: 9032 - DNA, 33 bp, synthetic construct
  misc_feature 1..33: note = Synthetic construct
  source 1..33: mol_type = other DNA
tgtcaccagtatgataagtctccctacactttc

SEQ ID NO: 9033 - DNA, 36 bp, synthetic construct
  misc_feature 1..36: note = Synthetic construct
  source 1..36: mol_type = other DNA
tgcctacaacatgataatttccctctcggctctttt

SEQ ID NO: 9034 - DNA, 36 bp, synthetic construct
  misc_feature 1..36: note = Synthetic construct
  source 1..36: mol_type = other DNA
tgtcaacagagtcacagttcctctccgtggacgttc

SEQ ID NO: 9035 - DNA, 33 bp, synthetic construct
  misc_feature 1..33: note = Synthetic construct
  source 1..33: mol_type = other DNA
tgcatgcaagctctacaaactccgtggacgttc

SEQ ID NO: 9036 - DNA, 39 bp, synthetic construct
  misc_feature 1..39: note = Synthetic construct
  source 1..39: mol_type = other DNA
tgccagtcctatgacagcagcctgagtggttgggtgttc

SEQ ID NO: 9037 - DNA, 33 bp, synthetic construct
  misc_feature 1..33: note = Synthetic construct
  source 1..33: mol_type = other DNA
tgtcaacaatattatgatacccctcggacgttc

SEQ ID NO: 9038 - DNA, 33 bp, synthetic construct
  misc_feature 1..33: note = Synthetic construct
  source 1..33: mol_type = other DNA
tgtcttcagcacaatggttaccctcggtcgttc

SEQ ID NO: 9039 - DNA, 39 bp, synthetic construct
  misc_feature 1..39: note = Synthetic construct
  source 1..39: mol_type = other DNA
tgtcagtcactagacagtagtggtgtttatgtggtattc

SEQ ID NO: 9040 - DNA, 33 bp, synthetic construct
  misc_feature 1..33: note = Synthetic construct
  source 1..33: mol_type = other DNA
tgtcaacagtattttgatctccgtttcggtttc

SEQ ID NO: 9041 - DNA, 33 bp, synthetic construct
  misc_feature 1..33: note = Synthetic construct
  source 1..33: mol_type = other DNA
tgcagctcgtatacaagcaacattattttattt

SEQ ID NO: 9042 - DNA, 33 bp, synthetic construct
  misc_feature 1..33: note = Synthetic construct
  source 1..33: mol_type = other DNA
tgtcagcagactaccagtttccctctcactttc

SEQ ID NO: 9043 - DNA, 33 bp, synthetic construct
  misc_feature 1..33: note = Synthetic construct
  source 1..33: mol_type = other DNA
tgtcagcactttaacggttctcctctcactttc

SEQ ID NO: 9044 - DNA, 42 bp, synthetic construct
  misc_feature 1..42: note = Synthetic construct
  source 1..42: mol_type = other DNA
tgtcaggtgtgggacagtagtagtgatcacccctatgtcttc

SEQ ID NO: 9045 - DNA, 33 bp, synthetic construct
  misc_feature 1..33: note = Synthetic construct
  source 1..33: mol_type = other DNA
tgtcaacagcttaatagttacccgctcactttc

SEQ ID NO: 9046 - DNA, 36 bp, synthetic construct
  misc_feature 1..36: note = Synthetic construct
  source 1..36: mol_type = other DNA
tgcaactcatatacaagcagcagcacttatgtcttc

SEQ ID NO: 9047 - DNA, 33 bp, synthetic construct
  misc_feature 1..33: note = Synthetic construct
  source 1..33: mol_type = other DNA
tgtcaacactataatgactggcaaatcactttc

SEQ ID NO: 9048 - DNA, 33 bp, synthetic construct
  misc_feature 1..33: note = Synthetic construct
  source 1..33: mol_type = other DNA
tgcgaacagacctatagtattccgtggactttc

SEQ ID NO: 9049 - DNA, 33 bp, synthetic construct
  misc_feature 1..33: note = Synthetic construct
  source 1..33: mol_type = other DNA
tgtcagcagcgtttcaagtggcccatcaccttc

SEQ ID NO: 9050 - DNA, 39 bp, synthetic construct
  misc_feature 1..39: note = Synthetic construct
  source 1..39: mol_type = other DNA
tgccagtcctttgacgacagcctgaatgcttcgctgttc

SEQ ID NO: 9051 - DNA, 39 bp, synthetic construct
  misc_feature 1..39: note = Synthetic construct
  source 1..39: mol_type = other DNA
tgtaactgccgagacaccagtggtgacccttgggtgttc

SEQ ID NO: 9052 - DNA, 36 bp, synthetic construct
  misc_feature 1..36: note = Synthetic construct
  source 1..36: mol_type = other DNA
tgtcagcagcgtagcaactggccctcggtcactttc

SEQ ID NO: 9053 - DNA, 33 bp, synthetic construct
  misc_feature 1..33: note = Synthetic construct
  source 1..33: mol_type = other DNA
tgcacgcaagctacacaattcccctacactttt

SEQ ID NO: 9054 - DNA, 33 bp, synthetic construct
  misc_feature 1..33: note = Synthetic construct
  source 1..33: mol_type = other DNA
tgtcaacaggctaacagtttacctctcactttc

SEQ ID NO: 9055 - DNA, 33 bp, synthetic construct
  misc_feature 1..33: note = Synthetic construct
  source 1..33: mol_type = other DNA
tgtcatcaaagtagtagtttaccgtacactttt

SEQ ID NO: 9056 - DNA, 33 bp, synthetic construct
  misc_feature 1..33: note = Synthetic construct
  source 1..33: mol_type = other DNA
tgtcagcagtatggtagttcacctcggacgttc

SEQ ID NO: 9057 - DNA, 21 bp, synthetic construct
  misc_feature 1..21: note = Synthetic construct
  source 1..21: mol_type = other DNA
tgtcaacagagtggcactttc

SEQ ID NO: 9058 - DNA, 30 bp, synthetic construct
  misc_feature 1..30: note = Synthetic construct
  source 1..30: mol_type = other DNA
tgccaacagtatcattcttattcgacgttc

SEQ ID NO: 9059 - DNA, 39 bp, synthetic construct
  misc_feature 1..39: note = Synthetic construct
  source 1..39: mol_type = other DNA
tgtcaggagtataatagctggcctccggagtacgctttt

SEQ ID NO: 9060 - DNA, 39 bp, synthetic construct
  misc_feature 1..39: note = Synthetic construct
  source 1..39: mol_type = other DNA
tgtcagcagtatggtagctcacctccgatgtacaccttt

SEQ ID NO: 9061 - DNA, 33 bp, synthetic construct
  misc_feature 1..33: note = Synthetic construct
  source 1..33: mol_type = other DNA
tgtcaacagttttttcgaaccccgtacactttt

SEQ ID NO: 9062 - DNA, 30 bp, synthetic construct
  misc_feature 1..30: note = Synthetic construct
  source 1..30: mol_type = other DNA
tgtatgatttggtcagacgcgtatgtcttc

SEQ ID NO: 9063 - DNA, 33 bp, synthetic construct
  misc_feature 1..33: note = Synthetic construct
  source 1..33: mol_type = other DNA
tgtcaacagtatgatgatcttccgctcactttc

SEQ ID NO: 9064 - DNA, 33 bp, synthetic construct
  misc_feature 1..33: note = Synthetic construct
  source 1..33: mol_type = other DNA
tgtcaacaggctgacaatttgccgtggacgttc

SEQ ID NO: 9065 - DNA, 39 bp, synthetic construct
  misc_feature 1..39: note = Synthetic construct
  source 1..39: mol_type = other DNA
tgtcagcagcgtagcgactggcctccggtgtacactttt

SEQ ID NO: 9066 - DNA, 39 bp, synthetic construct
  misc_feature 1..39: note = Synthetic construct
  source 1..39: mol_type = other DNA
tgcgccgcttgggacgaccacctgcgaattgtgggtttc

SEQ ID NO: 9067 - DNA, 39 bp, synthetic construct
  misc_feature 1..39: note = Synthetic construct
  source 1..39: mol_type = other DNA
tgtcaggtgtgggatagtagtagtgatccccgggtgttc

SEQ ID NO: 9068 - DNA, 33 bp, synthetic construct
  misc_feature 1..33: note = Synthetic construct
  source 1..33: mol_type = other DNA
tgtcagcaatattatagtactccgtggacgttc

SEQ ID NO: 9069 - DNA, 39 bp, synthetic construct
  misc_feature 1..39: note = Synthetic construct
  source 1..39: mol_type = other DNA
tgtgcagcatgggatgacagcctgaatggtcccgtcttc

SEQ ID NO: 9070 - DNA, 39 bp, synthetic construct
  misc_feature 1..39: note = Synthetic construct
  source 1..39: mol_type = other DNA
tgccagtcctatgacaacagcctgagtggttatgtcttc

SEQ ID NO: 9071 - DNA, 39 bp, synthetic construct
  misc_feature 1..39: note = Synthetic construct
  source 1..39: mol_type = other DNA
tgtgtcgtttgggatgtcagactgagtgggtatgtcttc

SEQ ID NO: 9072 - DNA, 33 bp, synthetic construct
  misc_feature 1..33: note = Synthetic construct
  source 1..33: mol_type = other DNA
tgtcaacaggctaacagtttcccctacactttt

SEQ ID NO: 9073 - DNA, 33 bp, synthetic construct
  misc_feature 1..33: note = Synthetic construct
  source 1..33: mol_type = other DNA
tgtcaacagggttacagtaccccattcactttc

SEQ ID NO: 9074 - DNA, 39 bp, synthetic construct
  misc_feature 1..39: note = Synthetic construct
  source 1..39: mol_type = other DNA
tgtcaggtgtgggatagtattagtgagcatcaagtgttc

SEQ ID NO: 9075 - DNA, 39 bp, synthetic construct
  misc_feature 1..39: note = Synthetic construct
  source 1..39: mol_type = other DNA
tgcggagcctgggacagcagcctgagagcggtggtgttc

SEQ ID NO: 9076 - DNA, 33 bp, synthetic construct
  misc_feature 1..33: note = Synthetic construct
  source 1..33: mol_type = other DNA
tgtcaacagtattatagtctccctctcactttc

SEQ ID NO: 9077 - DNA, 33 bp, synthetic construct
  misc_feature 1..33: note = Synthetic construct
  source 1..33: mol_type = other DNA
tgtcagcagtatagttcctcacctcggacgttc

SEQ ID NO: 9078 - DNA, 33 bp, synthetic construct
  misc_feature 1..33: note = Synthetic construct
  source 1..33: mol_type = other DNA
tgcatgcaaagtctacagactccgccgacgttc

SEQ ID NO: 9079 - DNA, 33 bp, synthetic construct
  misc_feature 1..33: note = Synthetic construct
  source 1..33: mol_type = other DNA
tgtcaacagagtttcagctccctttggacgttc

SEQ ID NO: 9080 - DNA, 36 bp, synthetic construct
  misc_feature 1..36: note = Synthetic construct
  source 1..36: mol_type = other DNA
tgcagctcctatacaagcggtcgtattctggttttc

SEQ ID NO: 9081 - DNA, 33 bp, synthetic construct
  misc_feature 1..33: note = Synthetic construct
  source 1..33: mol_type = other DNA
tgcatgcaaactctacaaactcctctcactttc

SEQ ID NO: 9082 - DNA, 33 bp, synthetic construct
  misc_feature 1..33: note = Synthetic construct
  source 1..33: mol_type = other DNA
tgtcaacagtattatagttaccccctcactttc

SEQ ID NO: 9083 - DNA, 39 bp, synthetic construct
  misc_feature 1..39: note = Synthetic construct
  source 1..39: mol_type = other DNA
tgtaactcccgggacagcagtggtaaccattgggtgttc

SEQ ID NO: 9084 - DNA, 39 bp, synthetic construct
  misc_feature 1..39: note = Synthetic construct
  source 1..39: mol_type = other DNA
tgcggaacatgggatagcagcctgagtgctgtggtattc

SEQ ID NO: 9085 - DNA, 39 bp, synthetic construct
  misc_feature 1..39: note = Synthetic construct
  source 1..39: mol_type = other DNA
tgcggaacatgggatagcagcctgagtgctaaagtattc

SEQ ID NO: 9086 - DNA, 36 bp, synthetic construct
  misc_feature 1..36: note = Synthetic construct
  source 1..36: mol_type = other DNA
tgtcaacagagttacagtacccccccgtacactttt

SEQ ID NO: 9087 - DNA, 33 bp, synthetic construct
  misc_feature 1..33: note = Synthetic construct
  source 1..33: mol_type = other DNA
tgtcaacagagttacagtacccctagaacgttc

SEQ ID NO: 9088 - DNA, 30 bp, synthetic construct
  misc_feature 1..30: note = Synthetic construct
  source 1..30: mol_type = other DNA
tgtcaacagtatgattatatccctcgcttc

SEQ ID NO: 9089 - DNA, 30 bp, synthetic construct
  misc_feature 1..30: note = Synthetic construct
  source 1..30: mol_type = other DNA
tgtcaacaatattattcttactctacgttc

SEQ ID NO: 9090 - DNA, 33 bp, synthetic construct
  misc_feature 1..33: note = Synthetic construct
  source 1..33: mol_type = other DNA
tgtcagcaatattttagtactccgtacactttt

SEQ ID NO: 9091 - DNA, 36 bp, synthetic construct
  misc_feature 1..36: note = Synthetic construct
  source 1..36: mol_type = other DNA
tgtcagcagcgtagcacctggcctccggggactttc

SEQ ID NO: 9092 - DNA, 33 bp, synthetic construct
  misc_feature 1..33: note = Synthetic construct
  source 1..33: mol_type = other DNA
tgccaacaatatgagagttatccgatcactttc

SEQ ID NO: 9093 - DNA, 33 bp, synthetic construct
  misc_feature 1..33: note = Synthetic construct
  source 1..33: mol_type = other DNA
tgtcaacattattataattaccctttcactttc

SEQ ID NO: 9094 - DNA, 33 bp, synthetic construct
  misc_feature 1..33: note = Synthetic construct
  source 1..33: mol_type = other DNA
tgtctacagcataatagttaccctcggacgttc

SEQ ID NO: 9095 - DNA, 33 bp, synthetic construct
  misc_feature 1..33: note = Synthetic construct
  source 1..33: mol_type = other DNA
tgtcaacaatattataatactccgtacactttt

SEQ ID NO: 9096 - DNA, 33 bp, synthetic construct
  misc_feature 1..33: note = Synthetic construct
  source 1..33: mol_type = other DNA
tgtcagcagtataataactggcctcacactttt

SEQ ID NO: 9097 - DNA, 33 bp, synthetic construct
  misc_feature 1..33: note = Synthetic construct
  source 1..33: mol_type = other DNA
tgtcagacctggggcaaaggcattcaggtgttt

SEQ ID NO: 9098 - DNA, 39 bp, synthetic construct
  misc_feature 1..39: note = Synthetic construct
  source 1..39: mol_type = other DNA
tgtcagtcctatgacaacagcctgagaacttcggtgttc

SEQ ID NO: 9099 - DNA, 33 bp, synthetic construct
  misc_feature 1..33: note = Synthetic construct
  source 1..33: mol_type = other DNA
tgtcaccaatataaaaacgcggggtggacgttc

SEQ ID NO: 9100 - DNA, 33 bp, synthetic construct
  misc_feature 1..33: note = Synthetic construct
  source 1..33: mol_type = other DNA
tgtcagcagcgtgacacctggccttggacgttc

SEQ ID NO: 9101 - DNA, 33 bp, synthetic construct
  misc_feature 1..33: note = Synthetic construct
  source 1..33: mol_type = other DNA
tgtcaacagtttaatagttaccctcgcactttc

SEQ ID NO: 9102 - DNA, 33 bp, synthetic construct
  misc_feature 1..33: note = Synthetic construct
  source 1..33: mol_type = other DNA
tgcctgctctactatggtggtgcttgggtgttc

SEQ ID NO: 9103 - DNA, 33 bp, synthetic construct
  misc_feature 1..33: note = Synthetic construct
  source 1..33: mol_type = other DNA
tgtcagcagtatggtagctcacttatcaccttc

SEQ ID NO: 9104 - DNA, 33 bp, synthetic construct
  misc_feature 1..33: note = Synthetic construct
  source 1..33: mol_type = other DNA
tgtcagcagtatggtagctcacctctcactttc

SEQ ID NO: 9105 - DNA, 33 bp, synthetic construct
  misc_feature 1..33: note = Synthetic construct
  source 1..33: mol_type = other DNA
tgccaacagtataatagttatccgtacactttt

SEQ ID NO: 9106 - DNA, 33 bp, synthetic construct
  misc_feature 1..33: note = Synthetic construct
  source 1..33: mol_type = other DNA
tgtcaacagtattatagtttcccgctcactttc

SEQ ID NO: 9107 - DNA, 33 bp, synthetic construct
  misc_feature 1..33: note = Synthetic construct
  source 1..33: mol_type = other DNA
tgccaacagtataatagttatttgtggacgttc

SEQ ID NO: 9108 - DNA, 36 bp, synthetic construct
  misc_feature 1..36: note = Synthetic construct
  source 1..36: mol_type = other DNA
tgtcagcagtatggtagctcaccactattcactttc

SEQ ID NO: 9109 - DNA, 39 bp, synthetic construct
  misc_feature 1..39: note = Synthetic construct
  source 1..39: mol_type = other DNA
tgtaactcccgggacagcagtggtaaccatgtggtcttc

SEQ ID NO: 9110 - DNA, 33 bp, synthetic construct
  misc_feature 1..33: note = Synthetic construct
  source 1..33: mol_type = other DNA
tgtcaacagtttgataatctccctatcaccttc

SEQ ID NO: 9111 - DNA, 33 bp, synthetic construct
  misc_feature 1..33: note = Synthetic construct
  source 1..33: mol_type = other DNA
tgtcaacagagttacagcatcccgtacactttt

SEQ ID NO: 9112 - DNA, 33 bp, synthetic construct
  misc_feature 1..33: note = Synthetic construct
  source 1..33: mol_type = other DNA
tgcatgcaacgtatagagtttccttggacgttc

SEQ ID NO: 9113 - DNA, 33 bp, synthetic construct
  misc_feature 1..33: note = Synthetic construct
  source 1..33: mol_type = other DNA
tgccaacactataatggttatccgtggacgttc

SEQ ID NO: 9114 - DNA, 33 bp, synthetic construct
  misc_feature 1..33: note = Synthetic construct
  source 1..33: mol_type = other DNA
tgtcaacagcttaatagttaccctcctcatttc

SEQ ID NO: 9115 - DNA, 36 bp, synthetic construct
  misc_feature 1..36: note = Synthetic construct
  source 1..36: mol_type = other DNA
tgcagctcatatacaagcagcagcacttatgtcttc

SEQ ID NO: 9116 - DNA, 33 bp, synthetic construct
  misc_feature 1..33: note = Synthetic construct
  source 1..33: mol_type = other DNA
tgtcaacaggctaacagtttcccgtacactttt

SEQ ID NO: 9117 - DNA, 33 bp, synthetic construct
  misc_feature 1..33: note = Synthetic construct
  source 1..33: mol_type = other DNA
tgtcagcagtataataactggccgtacactttt

SEQ ID NO: 9118 - DNA, 33 bp, synthetic construct
  misc_feature 1..33: note = Synthetic construct
  source 1..33: mol_type = other DNA
tgtcaacagagttacagtaccctctacactttt

SEQ ID NO: 9119 - DNA, 36 bp, synthetic construct
  misc_feature 1..36: note = Synthetic construct
  source 1..36: mol_type = other DNA
tgtcagcaatattatactactcccacgtggacgttc

SEQ ID NO: 9120 - DNA, 39 bp, synthetic construct
  misc_feature 1..39: note = Synthetic construct
  source 1..39: mol_type = other DNA
tgccaggtgtgggataacactgatgatcctgtggtattc

SEQ ID NO: 9121 - DNA, 33 bp, synthetic construct
  misc_feature 1..33: note = Synthetic construct
  source 1..33: mol_type = other DNA
tgtcagcagagtctcagtaccctgatcactttt

SEQ ID NO: 9122 - DNA, 33 bp, synthetic construct
  misc_feature 1..33: note = Synthetic construct
  source 1..33: mol_type = other DNA
tgtcaacagagttacattacccctctcactttc

SEQ ID NO: 9123 - DNA, 36 bp, synthetic construct
  misc_feature 1..36: note = Synthetic construct
  source 1..36: mol_type = other DNA
tgctcctcatacgcaagtgggggcactgtggttttc

SEQ ID NO: 9124 - DNA, 33 bp, synthetic construct
  misc_feature 1..33: note = Synthetic construct
  source 1..33: mol_type = other DNA
tgtcagcagggtaacaactggccgctcactttc

SEQ ID NO: 9125 - DNA, 36 bp, synthetic construct
  misc_feature 1..36: note = Synthetic construct
  source 1..36: mol_type = other DNA
tgtcagacttgggacagcagcacttcttatctcttc

SEQ ID NO: 9126 - DNA, 36 bp, synthetic construct
  misc_feature 1..36: note = Synthetic construct
  source 1..36: mol_type = other DNA
tgtcagcaatattatagtgctcctccctggacgttc

SEQ ID NO: 9127 - DNA, 39 bp, synthetic construct
  misc_feature 1..39: note = Synthetic construct
  source 1..39: mol_type = other DNA
tgtgcaacatgggatgacagtctgaatgctgtggttttc

SEQ ID NO: 9128 - DNA, 45 bp, synthetic construct
  misc_feature 1..45: note = Synthetic construct
  source 1..45: mol_type = other DNA
tgcgaagcatgggagagcagcctgagtggtggccatggggtcttc

SEQ ID NO: 9129 - DNA, 33 bp, synthetic construct
  misc_feature 1..33: note = Synthetic construct
  source 1..33: mol_type = other DNA
tgtcaacaacttaatacttaccctcggactttc

SEQ ID NO: 9130 - DNA, 33 bp, synthetic construct
  misc_feature 1..33: note = Synthetic construct
  source 1..33: mol_type = other DNA
tgtcaacagagttacaagttccctcggacgttc

SEQ ID NO: 9131 - DNA, 39 bp, synthetic construct
  misc_feature 1..39: note = Synthetic construct
  source 1..39: mol_type = other DNA
tgccagtcctatgacagcagcctgagtggtgtggttttc

SEQ ID NO: 9132 - DNA, 39 bp, synthetic construct
  misc_feature 1..39: note = Synthetic construct
  source 1..39: mol_type = other DNA
tgtcaatcagcagacagcagtgattcttatagggtcttc

SEQ ID NO: 9133 - DNA, 33 bp, synthetic construct
  misc_feature 1..33: note = Synthetic construct
  source 1..33: mol_type = other DNA
tgtcagtactatggtggctcaccaaagacgttc

SEQ ID NO: 9134 - DNA, 30 bp, synthetic construct
  misc_feature 1..30: note = Synthetic construct
  source 1..30: mol_type = other DNA
tgccaacattattatagtcaaacaatgttc

SEQ ID NO: 9135 - DNA, 33 bp, synthetic construct
  misc_feature 1..33: note = Synthetic construct
  source 1..33: mol_type = other DNA
tgtcaacagagtgacagtaccctgccctctttc

SEQ ID NO: 9136 - DNA, 33 bp, synthetic construct
  misc_feature 1..33: note = Synthetic construct
  source 1..33: mol_type = other DNA
tgtcagcagtatggtagctcactctggacgttc

SEQ ID NO: 9137 - DNA, 39 bp, synthetic construct
  misc_feature 1..39: note = Synthetic construct
  source 1..39: mol_type = other DNA
tgccagtcccatgacaccagccttcctggttcggtgttc

SEQ ID NO: 9138 - DNA, 33 bp, synthetic construct
  misc_feature 1..33: note = Synthetic construct
  source 1..33: mol_type = other DNA
tgtcaacagagtttcagttccgtttggacgttc

SEQ ID NO: 9139 - DNA, 33 bp, synthetic construct
  misc_feature 1..33: note = Synthetic construct
  source 1..33: mol_type = other DNA
tgcctgcagtatgatcactggatttacactttt

SEQ ID NO: 9140 - DNA, 33 bp, synthetic construct
  misc_feature 1..33: note = Synthetic construct
  source 1..33: mol_type = other DNA
tgcatgcaaggtacacattggcctccgggcttc

SEQ ID NO: 9141 - DNA, 30 bp, synthetic construct
  misc_feature 1..30: note = Synthetic construct
  source 1..30: mol_type = other DNA
tgtcagcagcgtagcgactggctcactttc

SEQ ID NO: 9142 - DNA, 39 bp, synthetic construct
  misc_feature 1..39: note = Synthetic construct
  source 1..39: mol_type = other DNA
tgctgctcatattcaagaggggacaccctgtatgtcttc

SEQ ID NO: 9143 - DNA, 33 bp, synthetic construct
  misc_feature 1..33: note = Synthetic construct
  source 1..33: mol_type = other DNA
tgtcagcaatattataataagcctcccactttt

SEQ ID NO: 9144 - DNA, 33 bp, synthetic construct
  misc_feature 1..33: note = Synthetic construct
  source 1..33: mol_type = other DNA
tgtcaggcgtgggacagcagcactgtgctattc

SEQ ID NO: 9145 - DNA, 33 bp, synthetic construct
  misc_feature 1..33: note = Synthetic construct
  source 1..33: mol_type = other DNA
tgtcagcaatatactctctcgcctcacaatttt

SEQ ID NO: 9146 - DNA, 39 bp, synthetic construct
  misc_feature 1..39: note = Synthetic construct
  source 1..39: mol_type = other DNA
tgccagtcctatgacagcagcctgagtggtcatgttttc

SEQ ID NO: 9147 - DNA, 33 bp, synthetic construct
  misc_feature 1..33: note = Synthetic construct
  source 1..33: mol_type = other DNA
tgtcaacagagttacattaccccgtggacgttc

SEQ ID NO: 9148 - DNA, 36 bp, synthetic construct
  misc_feature 1..36: note = Synthetic construct
  source 1..36: mol_type = other DNA
tgctgctcatatgcaggcagctacactttggtgttc

SEQ ID NO: 9149 - DNA, 33 bp, synthetic construct
  misc_feature 1..33: note = Synthetic construct
  source 1..33: mol_type = other DNA
tgtcaacagagttacagtacccctcggactttt

SEQ ID NO: 9150 - DNA, 42 bp, synthetic construct
  misc_feature 1..42: note = Synthetic construct
  source 1..42: mol_type = other DNA
tgtcaggtgtgggataatagtagtgatcatcctttagtattc

SEQ ID NO: 9151 - DNA, 36 bp, synthetic construct
  misc_feature 1..36: note = Synthetic construct
  source 1..36: mol_type = other DNA
tgtcttcaggattccaattacccttttgtcactttt

SEQ ID NO: 9152 - DNA, 33 bp, synthetic construct
  misc_feature 1..33: note = Synthetic construct
  source 1..33: mol_type = other DNA
tgtcaacagtattatagttacccgtacactttt

SEQ ID NO: 9153 - DNA, 33 bp, synthetic construct
  misc_feature 1..33: note = Synthetic construct
  source 1..33: mol_type = other DNA
tgtcaacagagtttcactacccctcccactttt

SEQ ID NO: 9154 - DNA, 33 bp, synthetic construct
  misc_feature 1..33: note = Synthetic construct
  source 1..33: mol_type = other DNA
tgtcagcaatatgatacgtggcctcggactttt

SEQ ID NO: 9155 - DNA, 39 bp, synthetic construct
  misc_feature 1..39: note = Synthetic construct
  source 1..39: mol_type = other DNA
tgctgctcatatgcaggcaggaactcggggaatgtcttc

SEQ ID NO: 9156 - DNA, 39 bp, synthetic construct
  misc_feature 1..39: note = Synthetic construct
  source 1..39: mol_type = other DNA
tgtcaggtgtgggacagtagtagtgatcatccggtattc

SEQ ID NO: 9157 - DNA, 33 bp, synthetic construct
  misc_feature 1..33: note = Synthetic construct
  source 1..33: mol_type = other DNA
tgtcaacagtattatagttccccgtacactttt

SEQ ID NO: 9158 - DNA, 39 bp, synthetic construct
  misc_feature 1..39: note = Synthetic construct
  source 1..39: mol_type = other DNA
tgtcaggtgtgggaccattctaatgatcattttgtcttc

SEQ ID NO: 9159 - DNA, 39 bp, synthetic construct
  misc_feature 1..39: note = Synthetic construct
  source 1..39: mol_type = other DNA
tgccagtcctttgacagcagcctgagtggttttgtcttc

SEQ ID NO: 9160 - DNA, 39 bp, synthetic construct
  misc_feature 1..39: note = Synthetic construct
  source 1..39: mol_type = other DNA
tgcggaacatgggatagcagcctgactgctggggtcttc

SEQ ID NO: 9161 - DNA, 33 bp, synthetic construct
  misc_feature 1..33: note = Synthetic construct
  source 1..33: mol_type = other DNA
tgtcagcagtatggttcctctttattcactttc

SEQ ID NO: 9162 - DNA, 33 bp, synthetic construct
  misc_feature 1..33: note = Synthetic construct
  source 1..33: mol_type = other DNA
tgtcaacagagttacagtacccctccgacgttc

SEQ ID NO: 9163 - DNA, 33 bp, synthetic construct
  misc_feature 1..33: note = Synthetic construct
  source 1..33: mol_type = other DNA
tgcatgcaaggtatacaccttccgtggacgttc

SEQ ID NO: 9164 - DNA, 39 bp, synthetic construct
  misc_feature 1..39: note = Synthetic construct
  source 1..39: mol_type = other DNA
tgtcagcagtataataactggcctcccaaatacactttt

SEQ ID NO: 9165 - DNA, 39 bp, synthetic construct
  misc_feature 1..39: note = Synthetic construct
  source 1..39: mol_type = other DNA
tgctgctcatatgcaggtagtagcactttcgtgctattc

SEQ ID NO: 9166 - DNA, 36 bp, synthetic construct
  misc_feature 1..36: note = Synthetic construct
  source 1..36: mol_type = other DNA
tgctgttcatattcaggcaggaacaacgatgtcttc

SEQ ID NO: 9167 - DNA, 39 bp, synthetic construct
  misc_feature 1..39: note = Synthetic construct
  source 1..39: mol_type = other DNA
tgtgcagcatgggatgacagcctgaatactaatgtcttc

SEQ ID NO: 9168 - DNA, 33 bp, synthetic construct
  misc_feature 1..33: note = Synthetic construct
  source 1..33: mol_type = other DNA
tgtcagtggagttccagtgtcttggtgacgttc

SEQ ID NO: 9169 - DNA, 36 bp, synthetic construct
  misc_feature 1..36: note = Synthetic construct
  source 1..36: mol_type = other DNA
tgtcagtcagcagacagcagtggcacttgggtgttc

SEQ ID NO: 9170 - DNA, 30 bp, synthetic construct
  misc_feature 1..30: note = Synthetic construct
  source 1..30: mol_type = other DNA
tgtcaacagcgtagcaactggtggacgttc

SEQ ID NO: 9171 - DNA, 36 bp, synthetic construct
  misc_feature 1..36: note = Synthetic construct
  source 1..36: mol_type = other DNA
tgcacctcatatacaggcatctctctctatgtcttc

SEQ ID NO: 9172 - DNA, 30 bp, synthetic construct
  misc_feature 1..30: note = Synthetic construct
  source 1..30: mol_type = other DNA
tgccagcaatatagtggttattggacgttc

SEQ ID NO: 9173 - DNA, 30 bp, synthetic construct
  misc_feature 1..30: note = Synthetic construct
  source 1..30: mol_type = other DNA
tgtcagcaatatgatacctcagggacgttc

SEQ ID NO: 9174 - DNA, 33 bp, synthetic construct
  misc_feature 1..33: note = Synthetic construct
  source 1..33: mol_type = other DNA
tgtcaatcagcaaacagcagtgcctccgtcttc

SEQ ID NO: 9175 - DNA, 33 bp, synthetic construct
  misc_feature 1..33: note = Synthetic construct
  source 1..33: mol_type = other DNA
tgtcagctctatgataactcccggtacactttt

SEQ ID NO: 9176 - DNA, 36 bp, synthetic construct
  misc_feature 1..36: note = Synthetic construct
  source 1..36: mol_type = other DNA
tgtcaacagcttagttcttaccctccgatcaccttc

SEQ ID NO: 9177 - DNA, 39 bp, synthetic construct
  misc_feature 1..39: note = Synthetic construct
  source 1..39: mol_type = other DNA
tgcggaacatgggataccagcctgagtggtgtggttttc

SEQ ID NO: 9178 - DNA, 33 bp, synthetic construct
  misc_feature 1..33: note = Synthetic construct
  source 1..33: mol_type = other DNA
tgtctacagtataataattaccctcgcacgttc

SEQ ID NO: 9179 - DNA, 39 bp, synthetic construct
  misc_feature 1..39: note = Synthetic construct
  source 1..39: mol_type = other DNA
tgctgttcatatgcaggtagtagccctaattatgtcttc

SEQ ID NO: 9180 - DNA, 39 bp, synthetic construct; identical to SEQ ID NO: 1840
  misc_feature 1..39: note = Synthetic construct
  source 1..39: mol_type = other DNA

SEQ ID NO: 9181 - DNA, 39 bp, synthetic construct
  misc_feature 1..39: note = Synthetic construct
  source 1..39: mol_type = other DNA
tgtcacctgtgggatagtagtagtggtcgctgggtgttt

SEQ ID NO: 9182 - DNA, 36 bp, synthetic construct
  misc_feature 1..36: note = Synthetic construct
  source 1..36: mol_type = other DNA
tgtcagcactatggagactcagcggcgtacactttt

SEQ ID NO: 9183 - DNA, 33 bp, synthetic construct
  misc_feature 1..33: note = Synthetic construct
  source 1..33: mol_type = other DNA
tgtcaacaggctgacactttcccattcaatttc

SEQ ID NO: 9184 - DNA, 33 bp, synthetic construct
  misc_feature 1..33: note = Synthetic construct
  source 1..33: mol_type = other DNA
tgtcagcagtatgctagttcacctcggacgttc

SEQ ID NO: 9185 - DNA, 30 bp, synthetic construct
  misc_feature 1..30: note = Synthetic construct
  source 1..30: mol_type = other DNA
tgtcaacaatatggtagtacactcactttc

SEQ ID NO: 9186 - DNA, 42 bp, synthetic construct
  misc_feature 1..42: note = Synthetic construct
  source 1..42: mol_type = other DNA
tgtcaggtgtgggatagtagttctgctcatgtttatgtcttc

SEQ ID NO: 9187 - DNA, 39 bp, synthetic construct
  misc_feature 1..39: note = Synthetic construct
  source 1..39: mol_type = other DNA
tgctgctcatatgcaggtagcagtcttcattatgtcttc

SEQ ID NO: 9188 - DNA, 36 bp, synthetic construct
  misc_feature 1..36: note = Synthetic construct
  source 1..36: mol_type = other DNA
tgccagtcctatgacaccagcctgagtggtgtcttc

SEQ ID NO: 9189 - DNA, 30 bp, synthetic construct
  misc_feature 1..30: note = Synthetic construct
  source 1..30: mol_type = other DNA
tgccaacaatataatagttattgcagtttt

SEQ ID NO: 9190 - DNA, 78 bp, synthetic construct
  misc_feature 1..78: note = Synthetic construct
  source 1..78: mol_type = other DNA
gaaattgtgttgacgcagtctccagacaccctgtctttgtttccaggggaaagagccaccctctcctgcagggccagt

SEQ ID NO: 9191 - DNA, 78 bp, synthetic construct
  misc_feature 1..78: note = Synthetic construct
  source 1..78: mol_type = other DNA
gacatccagatgacccagtctccttccaccctgtctgcttctgttggagacagagtcatcattacttgccgggccagt

SEQ ID NO: 9192 - DNA, 75 bp, synthetic construct
  misc_feature 1..75: note = Synthetic construct
  source 1..75: mol_type = other DNA
cagtctgccctgactcagcctgcctccgtgtctgggtctcctggacagtcgatcaccatctcctgcactggaacc

SEQ ID NO: 9193 - DNA, 78 bp, synthetic construct
  misc_feature 1..78: note = Synthetic construct
  source 1..78: mol_type = other DNA
gacatccagatgacccagtctccatcctccctgtctgcatctgtcggagacagagtcaccatcacttgccgggcgagt

SEQ ID NO: 9194 - DNA, 78 bp, synthetic construct
  misc_feature 1..78: note = Synthetic construct
  source 1..78: mol_type = other DNA
gaaaatgtgttgacgcagtttccaggcaccctgtctttgtctccaggggaaagagccaccctctcctgcagggccagt

SEQ ID NO: 9195 - DNA, 78 bp, synthetic construct
  misc_feature 1..78: note = Synthetic construct
  source 1..78: mol_type = other DNA
gaaattgtgttgacgcagtctccaggcaccctgtctttgtctccaggggaaagagccaccctctcctgcagggccagg

SEQ ID NO: 9196 - DNA, 75 bp, synthetic construct
  misc_feature 1..75: note = Synthetic construct
  source 1..75: mol_type = other DNA
caggctgtggtgactcaggagccctcactgactgtgtccccaggggggacagtcactctcacctgtggctccagc

SEQ ID NO: 9197 - DNA, 75 bp, synthetic construct
  misc_feature 1..75: note = Synthetic construct
  source 1..75: mol_type = other DNA
caatctgccctgactcagcctcgctcagtgtccgggtctcttggacagtcagtcaccatctcctgcactggaacc

SEQ ID NO: 9198 - DNA, 78 bp, synthetic construct
  misc_feature 1..78: note = Synthetic construct
  source 1..78: mol_type = other DNA
gaaattgtgttgacgcagtctccaggcaccctgtctgtgtctccaggggaaagagtcaccctctcctgcagggccagt

SEQ ID NO: 9199 - DNA, 78 bp, synthetic construct
  misc_feature 1..78: note = Synthetic construct
  source 1..78: mol_type = other DNA
gacatccagatgacccagtctccttccaccctgtctccatctgtaggagacagagtcaccatcacttgccgggccagt

SEQ ID NO: 9200 - DNA, 78 bp, synthetic construct
  misc_feature 1..78: note = Synthetic construct
  source 1..78: mol_type = other DNA
gacatcgttatgacccagtctccagacttcctggctgtgtctctgggcgagagggccaccatcaactgcaagtccagc

SEQ ID NO: 9201 - DNA, 75 bp, synthetic construct
  misc_feature 1..75: note = Synthetic construct
  source 1..75: mol_type = other DNA
tccgatgaattgacacagccaccctcgatgtcagtgtcactaggacaaacggccaggatcacctgctctggagat

SEQ ID NO: 9202 - DNA, 78 bp, synthetic construct
  misc_feature 1..78: note = Synthetic construct
  source 1..78: mol_type = other DNA
gaacttgtcttgacacagtctccagccaccctgtctttgtctccaggggaaagagccaccctctcctgcagggccagt

SEQ ID NO: 9203 - DNA, 78 bp, synthetic construct
  misc_feature 1..78: note = Synthetic construct
  source 1..78: mol_type = other DNA
gacatcgtgatgacccagtccccagactccctgactgtgtctctgggcgagagggccaccatcaactgcaagtccagc

SEQ ID NO: 9204 - DNA, 78 bp, synthetic construct
  misc_feature 1..78: note = Synthetic construct
  source 1..78: mol_type = other DNA
gaaattgtgctgacgcagtctccaggcaccctgtctttgtctccaggggaaagagccaccctctcctgcagggccagt

SEQ ID NO: 9205 - DNA, 75 bp, synthetic construct
  misc_feature 1..75: note = Synthetic construct
  source 1..75: mol_type = other DNA
gctgatccttggtctcctgctcctcaggctcaccagggcccagcactgactcactggcatgtatttctccctctt

SEQ ID NO: 9206 - DNA, 78 bp, synthetic construct
  misc_feature 1..78: note = Synthetic construct
  source 1..78: mol_type = other DNA
gacatcgtgatgacccagtctccagactccctggctgtgtctctgggcgagcgggccaccatctcctgcaagtccagc

SEQ ID NO: 9207 - DNA, 75 bp, synthetic construct
  misc_feature 1..75: note = Synthetic construct
  source 1..75: mol_type = other DNA
cagtctgtgctgacgcagccgccctcagtgtctggggccccaggccagagggtcaccatctcctgcactgggagc

SEQ ID NO: 9208 - DNA, 75 bp, synthetic construct
  misc_feature 1..75: note = Synthetic construct
  source 1..75: mol_type = other DNA
cagtctgccctgactcagcctccctccgcgtccgggtctcttggacagtcagtcaccatctcctgcactggaacc

SEQ ID NO: 9209 - DNA, 78 bp, synthetic construct
  misc_feature 1..78: note = Synthetic construct
  source 1..78: mol_type = other DNA
gacatcgtgatgacccagtctccagactccctggctgtgtctctgggcgagagggccaccatcaactgcaagtccagc

SEQ ID NO: 9210 - DNA, 75 bp, synthetic construct
  misc_feature 1..75: note = Synthetic construct
  source 1..75: mol_type = other DNA
tcttctgagctgactcaggaccctgctgtgtctgtggccttgggacagacagtcaagatcacatgccaaggagac

SEQ ID NO: 9211 - DNA, 75 bp, synthetic construct
  misc_feature 1..75: note = Synthetic construct
  source 1..75: mol_type = other DNA
aattttatactgactcagccccactctgtgtcggagtctccggggaagacggtcatcatctcctgcacccgcagc

SEQ ID NO: 9212 - DNA, 78 bp, synthetic construct
  misc_feature 1..78: note = Synthetic construct
  source 1..78: mol_type = other DNA
gacatcgtgatgacccaatctccaggctccctggctgtctctctgggcgagagggccacaataacctgcaagtccagc

SEQ ID NO: 9213 - DNA, 78 bp, synthetic construct
  misc_feature 1..78: note = Synthetic construct
  source 1..78: mol_type = other DNA
gaaattgtgctgactcagtctccgggctttcagtatgtgactccaaaggagaaagtcaccgtcacctgccgggccagt

SEQ ID NO: 9214 - DNA, 78 bp, synthetic construct
  misc_feature 1..78: note = Synthetic construct
  source 1..78: mol_type = other DNA
gaaattgtgttgacgcagtctccaggcaccctgtctttgtctccaggggaaagagccaccctctcctgcagggccagt

SEQ ID NO: 9215 - DNA, 78 bp, synthetic construct
  misc_feature 1..78: note = Synthetic construct
  source 1..78: mol_type = other DNA
gaaattgtgttgacgcagtctcctggcaccctgtctttgtctccaggggaaagagccaccctctcctgcagggccagt

SEQ ID NO: 9216 - DNA, 78 bp, synthetic construct
  misc_feature 1..78: note = Synthetic construct
  source 1..78: mol_type = other DNA
gaaattgtgttgacgcagtctccaggcaccctgtctttgtctccaggggaaagagccaccctctcttgcagggccagt

SEQ ID NO: 9217 - DNA, 75 bp, synthetic construct
  misc_feature 1..75: note = Synthetic construct
  source 1..75: mol_type = other DNA
tcctatgtgttgactcagccaccctcggtgtcagtggccccaggacagacggccaccattacctgtgggggatac

SEQ ID NO: 9218 - DNA, 75 bp, synthetic construct
  misc_feature 1..75: note = Synthetic construct
  source 1..75: mol_type = other DNA
cagtctgtgctgactcagccaccctcagcgtctgggacccccgggcagagggtctccatctcttgttctggagcc

SEQ ID NO: 9219 - DNA, 78 bp, synthetic construct
  misc_feature 1..78: note = Synthetic construct
  source 1..78: mol_type = other DNA
gacatccagatgacccagtctccatcctccctgtctgcatctattggagacagagtcaccctcacttgtcgggcaagt

SEQ ID NO: 9220 - DNA, 75 bp, synthetic construct
  misc_feature 1..75: note = Synthetic construct
  source 1..75: mol_type = other DNA
ctgtctgccctgactcagcctgcctccgtgtctgggtctcctggacagccgatcaccatctcctgcactggaagc

SEQ ID NO: 9221 - DNA, 78 bp, synthetic construct
  misc_feature 1..78: note = Synthetic construct
  source 1..78: mol_type = other DNA
gaaattgtgatgacccagactccactctctctgtccgtcacccctggacagccggcctccatctcctgcaagtctagt

SEQ ID NO: 9222 - DNA, 78 bp, synthetic construct
  misc_feature 1..78: note = Synthetic construct
  source 1..78: mol_type = other DNA
gccatccagttgacccagtctccatcctccctgtctgcgtctgtaggagacagagccaccatcacttgccgggccagt

SEQ ID NO: 9223 - DNA, 78 bp, synthetic construct
  misc_feature 1..78: note = Synthetic construct
  source 1..78: mol_type = other DNA
gccatccggatgacccagtctccatcctcactctctgcatctacaggagacagagtcaccatcacttgtcgggcgagt

SEQ ID NO: 9224 - DNA, 75 bp, synthetic construct
  misc_feature 1..75: note = Synthetic construct
  source 1..75: mol_type = other DNA
tccgacgagttgacacagccaccctcggtgtcagtgtccccaggacagacggccaggatcgcctgctctggagat

SEQ ID NO: 9225 - DNA, 75 bp, synthetic construct
  misc_feature 1..75: note = Synthetic construct
  source 1..75: mol_type = other DNA
cagtctgtgctgactcagccaccctcagcgtctgggacccccgggcagagggtcaccatctcttgttctggaagc

SEQ ID NO: 9226 - DNA, 78 bp, synthetic construct
  misc_feature 1..78: note = Synthetic construct
  source 1..78: mol_type = other DNA
gacatccagatgacccagtctccttccaccctgtctgcatctgtaggagacagagtcaccatctcttgccgggccagt

SEQ ID NO: 9227 - DNA, 75 bp, synthetic construct
  misc_feature 1..75: note = Synthetic construct
  source 1..75: mol_type = other DNA
cagtctgccctgactcagcctgcctccgtatctgggtctgctggacagtcgatcaccatctcctgcactggatcc

SEQ ID NO: 9228 - DNA, 78 bp, synthetic construct
  misc_feature 1..78: note = Synthetic construct
  source 1..78: mol_type = other DNA
gacatccagatgacccagtctccatcttccgtgtctgcatctgtaggagacagagtcacgatttcttgtcgggcgagt

SEQ ID NO: 9229 - DNA, 75 bp, synthetic construct
  misc_feature 1..75: note = Synthetic construct
  source 1..75: mol_type = other DNA
cagcctgtgctgactcagccaccttctgcatcagcctccctgggagcctcggtcacactcacctgcaccctgagc

SEQ ID NO: 9230 - DNA, 78 bp, synthetic construct
  misc_feature 1..78: note = Synthetic construct
  source 1..78: mol_type = other DNA
gccatccaaatgacccagtctccatccttcctgtctgcatctgtaggagacagagtcaccctcacttgccgggccagt

SEQ ID NO: 9231 - DNA, 78 bp, synthetic construct
  misc_feature 1..78: note = Synthetic construct
  source 1..78: mol_type = other DNA
gatgttgtgctgactcagtctccactctccctgcccgtcacccttggacagccggcctccatctcctgcatgtctagt

SEQ ID NO: 9232 - DNA, 78 bp, synthetic construct; identical to SEQ ID NO: 1844
  misc_feature 1..78: note = Synthetic construct
  source 1..78: mol_type = other DNA

SEQ ID NO: 9233 - DNA, 75 bp, synthetic construct
  misc_feature 1..75: note = Synthetic construct
  source 1..75: mol_type = other DNA
caatctgccctgactcagcctgcctctgtgtctgggtctcctggacagtcgatcaccatctcctgcactggaacc

SEQ ID NO: 9234 - DNA, 75 bp, synthetic construct
  misc_feature 1..75: note = Synthetic construct
  source 1..75: mol_type = other DNA
cagtctgccctgactcagcctgcctccgtgtctgggtctcctggacagtcgatcaccatctcctgcactgggagt

SEQ ID NO: 9235 - DNA, 75 bp, synthetic construct
  misc_feature 1..75: note = Synthetic construct
  source 1..75: mol_type = other DNA
cagtctgccctgactcagcctgcctccgtgtctgggtctcctggacagtcgatcaccatctcctgcactggatcc

SEQ ID NO: 9236 - DNA, 75 bp, synthetic construct
  misc_feature 1..75: note = Synthetic construct
  source 1..75: mol_type = other DNA
tcctatgtgctgactcagccaccctcggtgtcagtggccccaggacagacggccaggattacctgtgggggaaac

SEQ ID NO: 9237 - DNA, 78 bp, synthetic construct
  misc_feature 1..78: note = Synthetic construct
  source 1..78: mol_type = other DNA
gagattgtgttgacacagtctccagccaccctgtctttgtctccaggggaaagagccaccctctcctgcagggccagt

SEQ ID NO: 9238 - DNA, 78 bp, synthetic construct
  misc_feature 1..78: note = Synthetic construct
  source 1..78: mol_type = other DNA
gatgttgtgatgactcagtctccactctccctgcccgtcacccttggacagccggcctccatctcctgcaggtctagt

SEQ ID NO: 9239 - DNA, 78 bp, synthetic construct
  misc_feature 1..78: note = Synthetic construct
  source 1..78: mol_type = other DNA
gaaatagtgatgacgcagtctccagccaccctgtctgtgtctccaggggaaagcgccaccctctcctgcagggccagt

SEQ ID NO: 9240 - DNA, 75 bp, synthetic construct
  misc_feature 1..75: note = Synthetic construct
  source 1..75: mol_type = other DNA
cagttaatgctgactcaagcgccctctgcctctgcctcactgggagcctcacttaacctcaaatgcactctggac

SEQ ID NO: 9241 - DNA, 75 bp, synthetic construct
  misc_feature 1..75: note = Synthetic construct
  source 1..75: mol_type = other DNA
cagtctgtgctgacgcagccgccctcagtgtctggggccccagggcagagggtcaccatctcctgcactgggagc

SEQ ID NO: 9242 - DNA, 78 bp, synthetic construct
  misc_feature 1..78: note = Synthetic construct
  source 1..78: mol_type = other DNA
gaaattgtgttgacacagtctccagccaccctgtctttgtctccaggggaaagagtcaccctctcctgcagggccagt

SEQ ID NO: 9243 - DNA, 78 bp, synthetic construct
  misc_feature 1..78: note = Synthetic construct
  source 1..78: mol_type = other DNA
gaaattgtgttgacgcagtctccaggcaccctgtctttgtctcttggggaaagagccaccctctcctgcagggcccgt

SEQ ID NO: 9244 - DNA, 78 bp, synthetic construct
  misc_feature 1..78: note = Synthetic construct
  source 1..78: mol_type = other DNA
gatgttgtgttgactcagtctccaccctccctgcccgtcgcccttggacagccggcctccatctcctgcaggtctagt

SEQ ID NO: 9245 - DNA, 78 bp, synthetic construct
  misc_feature 1..78: note = Synthetic construct
  source 1..78: mol_type = other DNA
gacttcgtgctgacccagtctccagagtccctggctgtgtctctgggcgagagggccaccatcaactgcaagtccagc

SEQ ID NO: 9246 - DNA, 78 bp, synthetic construct
  misc_feature 1..78: note = Synthetic construct
  source 1..78: mol_type = other DNA
gaaattgtgttgacccagtctccagccaccctgtctttgtctccaggggaaagagccgccctctcctgcagggccagt

SEQ ID NO: 9247 - DNA, 75 bp, synthetic construct
  misc_feature 1..75: note = Synthetic construct
  source 1..75: mol_type = other DNA
caggctgtggtgactcaggagccctcactgactgtgtccccaggagggacagtcactctcacctgtggctccagc

SEQ ID NO: 9248 - DNA, 78 bp, synthetic construct
  misc_feature 1..78: note = Synthetic construct
  source 1..78: mol_type = other DNA
gacatccagatgacccagtctccatcctccctgtctgcatctgtaggagacagagtcaccatcacttgccgggcaagt

SEQ ID NO: 9249 - DNA, 78 bp, synthetic construct
  misc_feature 1..78: note = Synthetic construct
  source 1..78: mol_type = other DNA
gaaatagtggtgacgcagtctccagccaccctgtctctatctccaggggaaggaggcaccctctcctgcagggccagt

SEQ ID NO: 9250 - DNA, 78 bp, synthetic construct
  misc_feature 1..78: note = Synthetic construct
  source 1..78: mol_type = other DNA
gatgttgtgatgactcagtctccactctccctgcccgtcacccttggacagccggcctccatctcctgcaggtccagt

SEQ ID NO: 9251 - DNA, 78 bp, synthetic construct
  misc_feature 1..78: note = Synthetic construct
  source 1..78: mol_type = other DNA
gacatccagttgacccagtctccatcctccctgtctgcatctataggagacagagtcaccttcacttgcctggccagt

SEQ ID NO: 9252 - DNA, 78 bp, synthetic construct
  misc_feature 1..78: note = Synthetic construct
  source 1..78: mol_type = other DNA
gacatccagatgacccagtctccatcctccctgtctacatctgtcggagacagagtgaccatcacgtgccaggcgagt

SEQ ID NO: 9253 - DNA, 78 bp, synthetic construct
  misc_feature 1..78: note = Synthetic construct
  source 1..78: mol_type = other DNA
gacatccagatgacccagtctccatcctccctgtctgcatctgtaggagacagagtcaccatcacttgccgggcgagt

SEQ ID NO: 9254 - DNA, 78 bp, synthetic construct
  misc_feature 1..78: note = Synthetic construct
  source 1..78: mol_type = other DNA
gaaattgtgttgacacagtctccagccaccctgtctttgtctccaggagaaagagccaccctctcctgcagggccagt

SEQ ID NO: 9255 - DNA, 78 bp, synthetic construct
  misc_feature 1..78: note = Synthetic construct
  source 1..78: mol_type = other DNA
gacatccagatgacccagtctccatcctccctgtctgcatctgtaggagacagagttaccatcacttgccgggctagt

SEQ ID NO: 9256 - DNA, 78 bp, synthetic construct
  misc_feature 1..78: note = Synthetic construct
  source 1..78: mol_type = other DNA
gacatccagatgacccagtctccctcctccctgtctgcatctgtcggagacagagtcaccatcacttgccgggcaagt

SEQ ID NO: 9257 - DNA, 78 bp, synthetic construct
  misc_feature 1..78: note = Synthetic construct
  source 1..78: mol_type = other DNA
gacatccagatgacccagtctccatcctccctgtctgcatctgtgggagacagagtcaccatcacttgccgggcaagt

SEQ ID NO: 9258 - DNA, 78 bp, synthetic construct
  misc_feature 1..78: note = Synthetic construct
  source 1..78: mol_type = other DNA
gacatccacctgacccagtctccatcctccctgtctgcatctgcaggagacagggtcctcatcacttgccaggcgagt

SEQ ID NO: 9259 - DNA, 78 bp, synthetic construct
  misc_feature 1..78: note = Synthetic construct
  source 1..78: mol_type = other DNA
gaagttgtgttgacgcagtctccagacaccctctctttatatccaggggaaagagccaccctctcctgcagggccagt

SEQ ID NO: 9260 - DNA, 78 bp, synthetic construct
  misc_feature 1..78: note = Synthetic construct
  source 1..78: mol_type = other DNA
gaaattgtgttgacgcagtctccagacaccctgtctttgtctccaggggaaagagccaccctctcctgtagggccagt

SEQ ID NO: 9261 - DNA, 78 bp, synthetic construct
  misc_feature 1..78: note = Synthetic construct
  source 1..78: mol_type = other DNA
gacattcagatgactcagtcccccagctccctgtcagcaagcgtgggggaccgggtctccatcacctgccaggcctca

SEQ ID NO: 9262 - DNA, 78 bp, synthetic construct
  misc_feature 1..78: note = Synthetic construct
  source 1..78: mol_type = other DNA
gacatccagatgacccagtctccttccaccctgtctgcatctgtaggagacagagtcaccatcacttgccgggccagt

SEQ ID NO: 9263 - DNA, 78 bp, synthetic construct
  misc_feature 1..78: note = Synthetic construct
  source 1..78: mol_type = other DNA
gaaatagtgatgaggcagtctccagccaccctgtctgtgtctccaggggaaagagccaccctctcctgcagggccagt

SEQ ID NO: 9264 - DNA, 78 bp, synthetic construct
  misc_feature 1..78: note = Synthetic construct
  source 1..78: mol_type = other DNA
gaaatagtgatgacgcagtctccagccaccctgtctgtgtctccaggggggcgagccaccctctcctgcagggccagt

SEQ ID NO: 9265 - DNA, 78 bp, synthetic construct
  misc_feature 1..78: note = Synthetic construct
  source 1..78: mol_type = other DNA
gaaatagtgatgacgcagtctccagccaccctgtctgtgtctccaggggaaagagccaccctctcctgcagggccagt

SEQ ID NO: 9266 - DNA, 78 bp, synthetic construct
  misc_feature 1..78: note = Synthetic construct
  source 1..78: mol_type = other DNA
gaaatagtgatgacgcagtccccagccaccctgtctgtgtctccaggggacagagccaccctctcctgcagggccagt

SEQ ID NO: 9267 - DNA, 78 bp, synthetic construct
  misc_feature 1..78: note = Synthetic construct
  source 1..78: mol_type = other DNA
gaaatagtgctgacgcagtctccagccaccctgtctctgtctccaggggaaagagccaccctctcctgcagggccagt

SEQ ID NO: 9268 - DNA, 78 bp, synthetic construct
  misc_feature 1..78: note = Synthetic construct
  source 1..78: mol_type = other DNA
gaaattgtgttgacgcagtctccaggcaccctgtctttgtctccaggggaaagagccaccctctcctgcaggcccagt

SEQ ID NO: 9269 - DNA, 78 bp, synthetic construct
  misc_feature 1..78: note = Synthetic construct
  source 1..78: mol_type = other DNA
gacatcgtgatgacccagtctccagactccctggctgtgtctctgggcgagagggccaccatctactgcaggtccagc

SEQ ID NO: 9270 - DNA, 78 bp, synthetic construct
  misc_feature 1..78: note = Synthetic construct
  source 1..78: mol_type = other DNA
gacatcgtgatgacccagtctccagactccctgggtgtgtctctgggcgagcgggccaccatcaactgcaagtccagc

SEQ ID NO: 9271 - DNA, 78 bp, synthetic construct
  misc_feature 1..78: note = Synthetic construct
  source 1..78: mol_type = other DNA
gtcatctggatgacccagtctccatccttactctctgcatctacaggagacagagtcaccatcagttgtcggatgagt

SEQ ID NO: 9272 - DNA, 78 bp, synthetic construct
  misc_feature 1..78: note = Synthetic construct
  source 1..78: mol_type = other DNA
gacatcgtgatgacccagtctccagactctctggctgtgtctctgggcgagagggccaccatcaactgcaagtccagc

SEQ ID NO: 9273 - DNA, 78 bp, synthetic construct
  misc_feature 1..78: note = Synthetic construct
  source 1..78: mol_type = other DNA
gccatccggataacccagtctccatcctcactctctgcatctacaggagacagagtcaccatcacttgtcgggcgagt

SEQ ID NO: 9274 - DNA, 78 bp, synthetic construct
  misc_feature 1..78: note = Synthetic construct
  source 1..78: mol_type = other DNA
gacatcgtgatgacccagtctccagactccctggctgtgtctctgggcgagagggccaccatcaactgcaagtccagt

SEQ ID NO: 9275 - DNA, 75 bp, synthetic construct
  misc_feature 1..75: note = Synthetic construct
  source 1..75: mol_type = other DNA
tcctatgagctgacacagccaccctcggtgtcagtgtccccaggacagacggccaggatcacctgctctggagat

SEQ ID NO: 9276 - DNA, 75 bp, synthetic construct
  misc_feature 1..75: note = Synthetic construct
  source 1..75: mol_type = other DNA
tcttctgagctgactcaggaccctggtgtgtctgtggccttgggacagacagtcaggatcacatgccaaggagac

SEQ ID NO: 9277 - DNA, 75 bp, synthetic construct
  misc_feature 1..75: note = Synthetic construct
  source 1..75: mol_type = other DNA
tcctatgtgctgactcagccaccctcggtgtcagtggccccaggacagacggcctacttttcctgtgggggaacc

SEQ ID NO: 9278 - DNA, 75 bp, synthetic construct
  misc_feature 1..75: note = Synthetic construct
  source 1..75: mol_type = other DNA
cagtctgccctgactcagcctgcctccgtgtctgggtctcctggacagtcgatcaccatctcctgcagtggaacc

SEQ ID NO: 9279 - DNA, 75 bp, synthetic construct
  misc_feature 1..75: note = Synthetic construct
  source 1..75: mol_type = other DNA
cagtctgccctgactcagcctgcctccgtgtctgggtctcctggacagtcgatcaccatctgctgcactggaacc

SEQ ID NO: 9280 - DNA, 75 bp, synthetic construct
  misc_feature 1..75: note = Synthetic construct
  source 1..75: mol_type = other DNA
cagtctgccctgactcagtttgcctccgtgtctgggtctcctggacagtcgatcaccatctcctgcactggaacc

SEQ ID NO: 9281 - DNA, 75 bp, synthetic construct
  misc_feature 1..75: note = Synthetic construct
  source 1..75: mol_type = other DNA
cagtctgccctgactcagcctgcctccgtgtctgggtctcctggacagtcgatcaccatttcctgcactggaacc

SEQ ID NO: 9282 - DNA, 75 bp, synthetic construct
  misc_feature 1..75: note = Synthetic construct
  source 1..75: mol_type = other DNA
cagtctgccctgactcagcctgcctccgtgtctgggtttcttggacagtcgatcaccatctcctgcactggaacc

SEQ ID NO: 9283 - DNA, 75 bp, synthetic construct
  misc_feature 1..75: note = Synthetic construct
  source 1..75: mol_type = other DNA
cagtctgccctgactcaggctgcctccgtgtctgggtctcctggacagtcgatcaccatctcctacactggaacc

SEQ ID NO: 9284 - DNA, 78 bp, synthetic construct
  misc_feature 1..78: note = Synthetic construct
  source 1..78: mol_type = other DNA
gacatccagatgacccagtctccatcctccctgtcttcatctgtcggagacagagtcaccatcacttgccaggcgagt

SEQ ID NO: 9285 - DNA, 78 bp, synthetic construct
  misc_feature 1..78: note = Synthetic construct
  source 1..78: mol_type = other DNA
gaagttgtgttgacgcagtctccaggcaccctgtctttgtctccaggggaaagagccaccctctcctgcagggccagt

SEQ ID NO: 9286 - DNA, 78 bp, synthetic construct
  misc_feature 1..78: note = Synthetic construct
  source 1..78: mol_type = other DNA
aaaattgtgttgacgcagtctccagccaccctgtctttgtctccaggggaaagagccaccctctcctgcagggccagt

SEQ ID NO: 9287 - DNA, 78 bp, synthetic construct
  misc_feature 1..78: note = Synthetic construct
  source 1..78: mol_type = other DNA
gaaattgtgttgacacagtctccagccaccctgtctttgtctccaggggaaagagccaccctctcctgcagggccagt

SEQ ID NO: 9288 - DNA, 75 bp, synthetic construct
  misc_feature 1..75: note = Synthetic construct
  source 1..75: mol_type = other DNA
tcttctgagctgactcaggaccctgctgtgtctgtggccttgggacagacagtcaggatcacatgccaaggagac

SEQ ID NO: 9289 - DNA, 75 bp, synthetic construct
  misc_feature 1..75: note = Synthetic construct
  source 1..75: mol_type = other DNA
tcctatgtgctgactcagccaccctcggtgtcagtggccccaggacagacggccaggatgacgtgtgggggaaac

SEQ ID NO: 9290 - DNA, 78 bp, synthetic construct
  misc_feature 1..78: note = Synthetic construct
  source 1..78: mol_type = other DNA
gaaatagtgatgacgcagtctccagccaccctgtctgtgtctccaggggaaagagccaccctctcgtgcagggccagt

SEQ ID NO: 9291 - DNA, 75 bp, synthetic construct
  misc_feature 1..75: note = Synthetic construct
  source 1..75: mol_type = other DNA
cagtctgcgctgactcagtcaccctcagcgtctgagacccccgggcagagggtcaccatctcttgttctggaagc

SEQ ID NO: 9292 - DNA, 78 bp, synthetic construct
  misc_feature 1..78: note = Synthetic construct
  source 1..78: mol_type = other DNA
gatattgtgatgacccagactccactctccctgcccgtcacccctggagagccggcctccatctcctgcaggtctagt

SEQ ID NO: 9293 - DNA, 75 bp, synthetic construct
  misc_feature 1..75: note = Synthetic construct
  source 1..75: mol_type = other DNA
cagtctgccctgactcagcctcgctcagtgtccgggtctcctggacagtcagtcaccatctcctgcactggaacc

SEQ ID NO: 9294 - DNA, 78 bp, synthetic construct
  misc_feature 1..78: note = Synthetic construct
  source 1..78: mol_type = other DNA
gccatccagatgacccagtctccatcctccctgtctgcatctgttggagacagagtcaccatcacttgccgggcaagt

SEQ ID NO: 9295 - DNA, 75 bp, synthetic construct
  misc_feature 1..75: note = Synthetic construct
  source 1..75: mol_type = other DNA
tcctctgaactgacacagccaccctcggtgtcactgtccccaggacagacggccaggatcacctgctctggagat

SEQ ID NO: 9296 - DNA, 75 bp, synthetic construct
  misc_feature 1..75: note = Synthetic construct
  source 1..75: mol_type = other DNA
cagtctgccctgactcagcctccctccgcgtccgggtctcctggacagtcagtcaccatctcctgcactggaacc

SEQ ID NO: 9297 - DNA, 75 bp, synthetic construct
  misc_feature 1..75: note = Synthetic construct
  source 1..75: mol_type = other DNA
agttttattctgactcagccgcactctgtgtcggagtctccggggaaggcggtgaccatctcctgttcccgcagc

SEQ ID NO: 9298 - DNA, 78 bp, synthetic construct
  misc_feature 1..78: note = Synthetic construct
  source 1..78: mol_type = other DNA
gacatccagatgacccagtctccatcctccctgtctgcatctgtgggagacagagtcaccatcacctgccgggcgagt

SEQ ID NO: 9299 - DNA, 78 bp, synthetic construct
  misc_feature 1..78: note = Synthetic construct
  source 1..78: mol_type = other DNA
gacatccagatgacccagtctccttccaccctgtctgcatctgcaggagacagagtcaccatcacttgccgggccagt

SEQ ID NO: 9300 - DNA, 75 bp, synthetic construct
  misc_feature 1..75: note = Synthetic construct
  source 1..75: mol_type = other DNA
cagtctgtactgacgcagccgccctcagtgtctggggccccagggcagagggtcaccatctcctgcactgggagc

SEQ ID NO: 9301 - DNA, 78 bp, synthetic construct
  misc_feature 1..78: note = Synthetic construct
  source 1..78: mol_type = other DNA
gacatcgtgatgacccagtctccagactccctggctgtgtctctgggcgagagggccaccctcaactgcacgtccagt

SEQ ID NO: 9302 - DNA, 78 bp, synthetic construct
  misc_feature 1..78: note = Synthetic construct
  source 1..78: mol_type = other DNA
gaaattgtgttggcgcagtctccaggctccctgactttgtctccaggggaaagagccaccctctcctgcagggccagt

SEQ ID NO: 9303 - DNA, 78 bp, synthetic construct
  misc_feature 1..78: note = Synthetic construct
  source 1..78: mol_type = other DNA
gacatccagatgacccagtctccttccaccctgtctgcttctgtgggagacagactcaccatcacttgccgggccagt

SEQ ID NO: 9304 - DNA, 75 bp, synthetic construct
  misc_feature 1..75: note = Synthetic construct
  source 1..75: mol_type = other DNA
tcctatgaactgacacagccatcctcagtgtcagtgtctccgggacagacagccaggatcacctgctcaggagat

SEQ ID NO: 9305 - DNA, 75 bp, synthetic construct
  misc_feature 1..75: note = Synthetic construct
  source 1..75: mol_type = other DNA
tccttagtgctgactcaacaacccacagtgtcagtggcccccggaaagacggccaccataacctgtggggggacc

SEQ ID NO: 9306 - DNA, 78 bp, synthetic construct
  misc_feature 1..78: note = Synthetic construct
  source 1..78: mol_type = other DNA
gacattatgttgacgcagtctccaggcaccctgtctttgtctccaggggaaagagtcaccctctcctgcagggccagt

SEQ ID NO: 9307 - DNA, 78 bp, synthetic construct
  misc_feature 1..78: note = Synthetic construct
  source 1..78: mol_type = other DNA
gaaatagtgatgacgcagtctccagccatcctgtctgtgtctccaggggacagagccaccctctcctgcagggccagt

SEQ ID NO: 9308 - DNA, 78 bp, synthetic construct
  misc_feature 1..78: note = Synthetic construct
  source 1..78: mol_type = other DNA
gacatccagatgacccagtctccatcctccgtgtctgcttctgtaggagacagagtcaccatcacttgccgggcgagt

SEQ ID NO: 9309 - DNA, 78 bp, synthetic construct
  misc_feature 1..78: note = Synthetic construct
  source 1..78: mol_type = other DNA
gacatccagatgacccagtctccttccaccctgtctgcatctgtaggagaaagagtcaccatcacttgccgggccagc

SEQ ID NO: 9310 - DNA, 75 bp, synthetic construct
  misc_feature 1..75: note = Synthetic construct
  source 1..75: mol_type = other DNA
cagtctgtgctgactcagccaccctcagcatctgggacccccgggcagaggatcaccatctcttgttctggcagc

SEQ ID NO: 9311 - DNA, 75 bp, synthetic construct
  misc_feature 1..75: note = Synthetic construct
  source 1..75: mol_type = other DNA
tcctatgagctgacacagccatcctcagtgtccgtgtctccgggacagacagccaggatcacctgttcaggagat

SEQ ID NO: 9312 - DNA, 75 bp, synthetic construct
  misc_feature 1..75: note = Synthetic construct
  source 1..75: mol_type = other DNA
tcctatgagctgacacagccaccctcggtgtcagtgtccccaggacagacggccaggatcccctgctctggaggt

SEQ ID NO: 9313 - DNA, 78 bp, synthetic construct
  misc_feature 1..78: note = Synthetic construct
  source 1..78: mol_type = other DNA
gacatccagatgacccagtctccttccaccctgtctgcatctgtcggagacagagtcaccatcacttgccgggccagt

SEQ ID NO: 9314 - DNA, 75 bp, synthetic construct
  misc_feature 1..75: note = Synthetic construct
  source 1..75: mol_type = other DNA
cagtctgtgctgacgcagccgccctcagtgtctggggccccagggcacaaggtcaccatctcctgcactgggagc

SEQ ID NO: 9315 - DNA, 78 bp, synthetic construct
  misc_feature 1..78: note = Synthetic construct
  source 1..78: mol_type = other DNA
gaaattgtgatgactcagtctccactctccctgcccgtcgcccctggagagccggcctccatctcctgcacgtctagt

SEQ ID NO: 9316 - DNA, 78 bp, synthetic construct
  misc_feature 1..78: note = Synthetic construct
  source 1..78: mol_type = other DNA
gaaattgtgttgacgcagtctccaggcaccctgtctttgtctccaggggaaactgccaccctctcctgcagggccagt

SEQ ID NO: 9317 - DNA, 75 bp, synthetic construct
  misc_feature 1..75: note = Synthetic construct
  source 1..75: mol_type = other DNA
aattttatgctgactcagccccactctgtgtcggagtctccggggaagacggtaaccatctcctgcacccgcagc

SEQ ID NO: 9318 - DNA, 78 bp, synthetic construct
  misc_feature 1..78: note = Synthetic construct
  source 1..78: mol_type = other DNA
gacatccagatgacccagtctccttccaccctgtctgcatctgtgggagacagagtcaccatcacttgccgggccagt

SEQ ID NO: 9319 - DNA, 75 bp, synthetic construct
  misc_feature 1..75: note = Synthetic construct
  source 1..75: mol_type = other DNA
tcctatgacctgagtcagccaccctcagtgtccgtgtccccacgacagacagccaacatcacctgctctggacat

SEQ ID NO: 9320 - DNA, 78 bp, synthetic construct
  misc_feature 1..78: note = Synthetic construct
  source 1..78: mol_type = other DNA
gaaatagtgatgacgcagtctccagccaccctgtctgtgtctccagggggaagagccaccctcacctgcacggccact

SEQ ID NO: 9321 - DNA, 78 bp, synthetic construct
  misc_feature 1..78: note = Synthetic construct
  source 1..78: mol_type = other DNA
caaattgtgttgacgcagtctccaggcaccctgtctttgtctccaggggaaagagccaccctctcctgcagggccagt

SEQ ID NO: 9322 - DNA, 78 bp, synthetic construct
  misc_feature 1..78: note = Synthetic construct
  source 1..78: mol_type = other DNA
gacatcgtgatgacccagtccccagactccctggctgtgtctctgggcgcgagggccaccatcaactgcaagtctagt

SEQ ID NO: 9323 - DNA, 78 bp, synthetic construct
  misc_feature 1..78: note = Synthetic construct
  source 1..78: mol_type = other DNA
gatgttgtggtcactcagtctccactttccctgcccgtcatccttggacagccggcctccatctcctgcaggtccagt

SEQ ID NO: 9324 - DNA, 78 bp, synthetic construct
  misc_feature 1..78: note = Synthetic construct
  source 1..78: mol_type = other DNA
gacatccagatgacccagtctccatcctccctgtctgcatctgtaggagacagagtcaccatcacttgccaggcgagc

SEQ ID NO: 9325 - DNA, 78 bp, synthetic construct
  misc_feature 1..78: note = Synthetic construct
  source 1..78: mol_type = other DNA
gaaatagtcatgacgcagtctccagccaccctgtctgtgtctccaggggaaagagccaccctctcctgcagggccagt

SEQ ID NO: 9326 - DNA, 75 bp, synthetic construct
  misc_feature 1..75: note = Synthetic construct
  source 1..75: mol_type = other DNA
cagtctgtgcttattcagccaccctcagcgtctgggacccccgggcagagggtctccatcccttgctctgggagc

SEQ ID NO: 9327 - DNA, 78 bp, synthetic construct
  misc_feature 1..78: note = Synthetic construct
  source 1..78: mol_type = other DNA
ggcatcctgttgacccagtctccaccgtccctgtctgcatccgagggagacagagtcaccatcacttgccgggcaaat

SEQ ID NO: 9328 - DNA, 75 bp, synthetic construct
  misc_feature 1..75: note = Synthetic construct
  source 1..75: mol_type = other DNA
cagactgtggtgacccaggagccatcgttctcagtgtcccctggagggacagtcacactcacttgtggcttgacc

SEQ ID NO: 9329 - DNA, 78 bp, synthetic construct
  misc_feature 1..78: note = Synthetic construct
  source 1..78: mol_type = other DNA
gaaattgtgttgacgcagtctccaggcaccctgtctttgtctccaggggaaagcgccaccctctcctgcagggccagt

SEQ ID NO: 9330 - DNA, 78 bp, synthetic construct
  misc_feature 1..78: note = Synthetic construct
  source 1..78: mol_type = other DNA
gaaattgtgttgacgcagtctccaggcaccctgtctttgtctccagggggaagagccggtctctcctgtagggccagt

SEQ ID NO: 9331 - DNA, 78 bp, synthetic construct
  misc_feature 1..78: note = Synthetic construct
  source 1..78: mol_type = other DNA
gaaattgtgctgactcagtctccagactttcaggctgtgactccaaaggagaaagtcaccatcacctgccgggccagt

SEQ ID NO: 9332 - DNA, 78 bp, synthetic construct
  misc_feature 1..78: note = Synthetic construct
  source 1..78: mol_type = other DNA
gaaattgtgttgacacagtctccaggcaccctgtctttgtctccaggggaaagagccaccctctcctgcagggccagt

SEQ ID NO: 9333 - DNA, 78 bp, synthetic construct
  misc_feature 1..78: note = Synthetic construct
  source 1..78: mol_type = other DNA
gccatccagatgacccagtctccatcctccctgtctgcatctgtaggagacagagtcaccatcacttgccgggcaagt

SEQ ID NO: 9334 - DNA, 78 bp, synthetic construct
  misc_feature 1..78: note = Synthetic construct
  source 1..78: mol_type = other DNA
gatattgtgatgacccagactccactctcctcacctgtcacccttggacagccggcctccatctcctgcaggtctagt

SEQ ID NO: 9335 - DNA, 75 bp, synthetic construct
  misc_feature 1..75: note = Synthetic construct
  source 1..75: mol_type = other DNA
aactttatgttgactcagccccactctgtgtcggagtcaccggggaagacggtaaccatctcttgtattcgcggc

SEQ ID NO: 9336 - DNA, 78 bp, synthetic construct
  misc_feature 1..78: note = Synthetic construct
  source 1..78: mol_type = other DNA
gaaatagtgatgacgcagtctccagccaccctgtctgtgtctccaggggatagagccaccctctcctgcagggccagt

SEQ ID NO: 9337 - DNA, 75 bp, synthetic construct
  misc_feature 1..75: note = Synthetic construct
  source 1..75: mol_type = other DNA
tcttatgtgctgactcagccaccctcggtgtcagtggccccaggacagacggccaggattacctgtgggggagac

SEQ ID NO: 9338 - DNA, 75 bp, synthetic construct
  misc_feature 1..75: note = Synthetic construct
  source 1..75: mol_type = other DNA
cagtctgccctgactcagcctcgctcagtgtccggatctcctggacagtcagtcaccatctcctgcactggaacc

SEQ ID NO: 9339 - DNA, 78 bp, synthetic construct
  misc_feature 1..78: note = Synthetic construct
  source 1..78: mol_type = other DNA
gacatcgtggtgacccagtctccagactccctggctgtgtctctgggcgagagggccaccatcaactgcaagtccagc

SEQ ID NO: 9340 - DNA, 78 bp, synthetic construct
  misc_feature 1..78: note = Synthetic construct
  source 1..78: mol_type = other DNA
gacatccagatgacccagtctccatcctccctgtctgcatctgtgggagacagagtcaccatcacttgccgggcgagt

SEQ ID NO: 9341 - DNA, 78 bp, synthetic construct
  misc_feature 1..78: note = Synthetic construct
  source 1..78: mol_type = other DNA
gaaatagtgctgacgcagtctccagccaccctgtctgtgtctccaggggaaagagccaccctctcctgcagggccagt

SEQ ID NO: 9342 - DNA, 78 bp, synthetic construct
  misc_feature 1..78: note = Synthetic construct
  source 1..78: mol_type = other DNA
gacatccagatgacccagtctccgtcctccctgtctgcatctgtaggagacagagtcaccatcacttgccgggcaagt

SEQ ID NO: 9343 - DNA, 78 bp, synthetic construct
  misc_feature 1..78: note = Synthetic construct
  source 1..78: mol_type = other DNA
gatattgtgatgactcagtctccactctccctgcccgtcacccctggagagccggcctccatctcctgcaagtctagt

SEQ ID NO: 9344 - DNA, 75 bp, synthetic construct
  misc_feature 1..75: note = Synthetic construct
  source 1..75: mol_type = other DNA
tcttctgggctgactcaggaccctgttgtgtctgtggccttggggcagacagtcaagatcaaatgccagggtgac

SEQ ID NO: 9345 - DNA, 78 bp, synthetic construct
  misc_feature 1..78: note = Synthetic construct
  source 1..78: mol_type = other DNA
gaaattgtgttgacacagtctccagccaccctgtccttgtctccaggggaaagagccaccctctcctgcagggccagt

SEQ ID NO: 9346 - DNA, 78 bp, synthetic construct
  misc_feature 1..78: note = Synthetic construct
  source 1..78: mol_type = other DNA
gaaagagtgatgacgcagtctccagccaccctgtctgtgtctccaggggaaagagccaccctctcctgcagggccagt

SEQ ID NO: 9347 - DNA, 75 bp, synthetic construct
  misc_feature 1..75: note = Synthetic construct
  source 1..75: mol_type = other DNA
cagtctgtgctgactcagcccccctcaacgtctgggacccccgggcagagggtcaccatctcttgttctgggacc

SEQ ID NO: 9348 - DNA, 75 bp, synthetic construct
  misc_feature 1..75: note = Synthetic construct
  source 1..75: mol_type = other DNA
tcctatgtactgactcagccaccctcggtgtcagtggccccaggacagacggccaagattacctgtgggggaaac

SEQ ID NO: 9349 - DNA, 75 bp, synthetic construct
  misc_feature 1..75: note = Synthetic construct
  source 1..75: mol_type = other DNA
cagtctgtcttgactcagccaccctcagtgtctgggacccccgggcagagggtcaccatgtcttgttctggaagc

SEQ ID NO: 9350 - DNA, 78 bp, synthetic construct
  misc_feature 1..78: note = Synthetic construct
  source 1..78: mol_type = other DNA
gacatccagatgacccagtctccatcctccctgtctgcgtctgtaggagacagagtcaccatcacttgccgggcgagt

SEQ ID NO: 9351 - DNA, 78 bp, synthetic construct
  misc_feature 1..78: note = Synthetic construct
  source 1..78: mol_type = other DNA
gacatccagatgacccagtctccttccaccctgtctgcatctgtaggagacagagtcaccttcacttgccgggccagt

SEQ ID NO: 9352 - DNA, 78 bp, synthetic construct
  misc_feature 1..78: note = Synthetic construct
  source 1..78: mol_type = other DNA
gacatccagatgacccagtctccttccaccctgtctgcatctgtaggagacagagtcaatatcacttgccgggccagt

SEQ ID NO: 9353 - DNA, 75 bp, synthetic construct
  misc_feature 1..75: note = Synthetic construct
  source 1..75: mol_type = other DNA
tactatgtgctgactcagccaccctcggtgtcagtggccccaggacagacggccaggatcacctgcgggggaaac

SEQ ID NO: 9354 - DNA, 75 bp, synthetic construct
  misc_feature 1..75: note = Synthetic construct
  source 1..75: mol_type = other DNA
tcccatgtgctgactcagccaccctcggtgtcagtggccccaggacagacggccaggattacctgtgggggagac

SEQ ID NO: 9355 - DNA, 75 bp, synthetic construct
  misc_feature 1..75: note = Synthetic construct
  source 1..75: mol_type = other DNA
cagcttgtgctgactcaatcgccctctgcctctgcctccctgggagcctcggtcaagctcacctgcactctgagc

SEQ ID NO: 9356 - DNA, 78 bp, synthetic construct
  misc_feature 1..78: note = Synthetic construct
  source 1..78: mol_type = other DNA
gccatccagatgactcagtctccatcctccctgtctgcatctgtaggagacagagtcaccatcacttgccgggcaagt

SEQ ID NO: 9357 - DNA, 75 bp, synthetic construct
  misc_feature 1..75: note = Synthetic construct
  source 1..75: mol_type = other DNA
tcctatgacctgacacagccaccctcggtgtcagtgtccccacgacagacggccacgatcacctgctctggagat

SEQ ID NO: 9358 - DNA, 78 bp, synthetic construct
  misc_feature 1..78: note = Synthetic construct
  source 1..78: mol_type = other DNA
caaattgtgttgacacagtctccagccaccctatctttgtctccaggggaaaaagccaccctctcatgcagggccagt

SEQ ID NO: 9359 - DNA, 78 bp, synthetic construct
  misc_feature 1..78: note = Synthetic construct
  source 1..78: mol_type = other DNA
gaaattgtgttgacacagtctccagccaccctgtctttgtctccgggggaaagagccaccctctcctgcagggccagt

SEQ ID NO: 9360 - DNA, 75 bp, synthetic construct
  misc_feature 1..75: note = Synthetic construct
  source 1..75: mol_type = other DNA
aattttatgctgactcagccctactctgtgtcggagtctccggggaagacggtaaccatctcctgcacccgcagc

SEQ ID NO: 9361 - DNA, 75 bp, synthetic construct
  misc_feature 1..75: note = Synthetic construct
  source 1..75: mol_type = other DNA
tcttctgagctgactcaggaccctgctgtgtctgtggccttgggacagacagtcacgatcacctgccaaggagac

SEQ ID NO: 9362 - DNA, 75 bp, synthetic construct
  misc_feature 1..75: note = Synthetic construct
  source 1..75: mol_type = other DNA
tcctatgtgctgactcagccaccctcagtgtcagtggccccaggaaagacggccaggattacctgtgggggaaac

SEQ ID NO: 9363 - DNA, 75 bp, synthetic construct
  misc_feature 1..75: note = Synthetic construct
  source 1..75: mol_type = other DNA
tcctatgagctgactcagccaccctcagtgtccgtgtccccaggacagacagccagcatcacctgctctggagat

SEQ ID NO: 9364 - DNA, 15 bp, synthetic construct
  misc_feature 1..15: note = Synthetic construct
  source 1..15: mol_type = other DNA
tcctgcactggaacc

SEQ ID NO: 9365 - DNA, 78 bp, synthetic construct
  misc_feature 1..78: note = Synthetic construct
  source 1..78: mol_type = other DNA
gacgtccagatgacccaatctccatcttccgtgtctgcatctgtaggagaccgagtcaccatcacttgtcgggcgagt

SEQ ID NO: 9366 - DNA, 78 bp, synthetic construct
  misc_feature 1..78: note = Synthetic construct
  source 1..78: mol_type = other DNA
gaagttctcttgacacagactccagccaccctgtctttgtctccaggggagagagccaccctctcctgcagggccaat

SEQ ID NO: 9367 - DNA, 78 bp, synthetic construct
  misc_feature 1..78: note = Synthetic construct
  source 1..78: mol_type = other DNA
gccatccagttgacccagtctccatccttcctgtctgcatctgtaggagacagagtcaccatcacttgccgggccagt

SEQ ID NO: 9368 - DNA, 78 bp, synthetic construct
  misc_feature 1..78: note = Synthetic construct
  source 1..78: mol_type = other DNA
aaaatagtgatgacgcagtctccagccaccctgtctgtgtctccaggggagagagccacgctctcctgcagggccagt

SEQ ID NO: 9369 - DNA, 78 bp, synthetic construct
  misc_feature 1..78: note = Synthetic construct
  source 1..78: mol_type = other DNA
gacatccagatgacccagcctccttccaccctgtctgcatctgtaggagacagagtcagcatcacttgccgggccagt

SEQ ID NO: 9370 - DNA, 78 bp, synthetic construct
  misc_feature 1..78: note = Synthetic construct
  source 1..78: mol_type = other DNA
gacatccagatgacccagtctccttccaccctgtctgcatctgtaggggacagaatcaccatcacttgccgggccagt

SEQ ID NO: 9371 - DNA, 75 bp, synthetic construct
  misc_feature 1..75: note = Synthetic construct
  source 1..75: mol_type = other DNA
tcctatgtgctgactcagccaccctcggtgtcagtggccccaggacagacggccagaattacctgtgaggcagac

SEQ ID NO: 9372 - DNA, 78 bp, synthetic construct
  misc_feature 1..78: note = Synthetic construct
  source 1..78: mol_type = other DNA
gacatgcagatgacccagtctccttccaccctgtctgcatttgtaggagacagagtcaccatcacttgccgggccagt

SEQ ID NO: 9373 - DNA, 78 bp, synthetic construct
  misc_feature 1..78: note = Synthetic construct
  source 1..78: mol_type = other DNA
gaattagtgatgacgcagtctccagccaccctgtctgtgtctccaggggagagagccaccctgtcctgcagggccagt

SEQ ID NO: 9374 - DNA, 78 bp, synthetic construct
  misc_feature 1..78: note = Synthetic construct
  source 1..78: mol_type = other DNA
gacatccagatgacccagtctccttccattctgtctgcttctgtaggggatagagtcaccatcacttgccgggccaac

SEQ ID NO: 9375 - DNA, 78 bp, synthetic construct
  misc_feature 1..78: note = Synthetic construct
  source 1..78: mol_type = other DNA
gacatcgtgatgacccagtctccagactccctgcctgtgtctctgggcgagagggccaccatcaactgcaagtccagc

SEQ ID NO: 9376 - DNA, 75 bp, synthetic construct
  misc_feature 1..75: note = Synthetic construct
  source 1..75: mol_type = other DNA
tcttctgagttggcccaggaccctgctgtgtctgtggccttggggcacacagtcacgatcacatgccgaggagac

SEQ ID NO: 9377 - DNA, 75 bp, synthetic construct
  misc_feature 1..75: note = Synthetic construct
  source 1..75: mol_type = other DNA
cagtctgccctgactcagcctgcctccgtgtctgggtctcctggacagtcgatcaccatctcctgcactggaagc

SEQ ID NO: 9378 - DNA, 75 bp, synthetic construct
  misc_feature 1..75: note = Synthetic construct
  source 1..75: mol_type = other DNA
tcttctgagttgactcaggaccctgctgtgtctgtggccttgggacagacagtcaggatcacatgccaaggagac

SEQ ID NO: 9379 - DNA, 78 bp, synthetic construct
  misc_feature 1..78: note = Synthetic construct
  source 1..78: mol_type = other DNA
gaaattgtgatgacgcagtctccagtcacgttgtctgtgtctccgggggaaagagtcgcgctctcctgcagggccagt

SEQ ID NO: 9380 - DNA, 78 bp, synthetic construct
  misc_feature 1..78: note = Synthetic construct
  source 1..78: mol_type = other DNA
gaaattgtgttgacgcagtctccaggcaccctgtctttgtctccagggggaagagccggtctctcctgcagggccagt

SEQ ID NO: 9381 - DNA, 75 bp, synthetic construct
  misc_feature 1..75: note = Synthetic construct
  source 1..75: mol_type = other DNA
ccctatgtgctgacgcagccaccctcggtgtcagtggccccaggacagacggccaggactacctgtgggggaaac

SEQ ID NO: 9382 - DNA, 78 bp, synthetic construct
  misc_feature 1..78: note = Synthetic construct
  source 1..78: mol_type = other DNA
gacatccagatgacccagtctcctttcaccctgtctgcatctgtcggcgacagaatcaccatcacttgccgggccagt

SEQ ID NO: 9383 - DNA, 78 bp, synthetic construct
  misc_feature 1..78: note = Synthetic construct
  source 1..78: mol_type = other DNA
gatattgtgttgacacagtctccagccaccctgtctttgtctccaggagaaagagccaccctctcctgcagggccagt

SEQ ID NO: 9384 - DNA, 78 bp, synthetic construct
  misc_feature 1..78: note = Synthetic construct
  source 1..78: mol_type = other DNA
gaaatagtgatgacgcagtctccagccaccctgtctgtgtctccaggggaaagagccaccctctcctgctgggccagt

SEQ ID NO: 9385 - DNA, 75 bp, synthetic construct
  misc_feature 1..75: note = Synthetic construct
  source 1..75: mol_type = other DNA
cagtctgttttggcgcagccgccctcagtgtctgcggccccaggacagagggtcaccatctcctgctctggaagc

SEQ ID NO: 9386 - DNA, 75 bp, synthetic construct
  misc_feature 1..75: note = Synthetic construct
  source 1..75: mol_type = other DNA
cagtctgtgttgacgcagccgccctcagtgtctgcggccccaggacagaaggtcaccatctcctgctctggaagc

SEQ ID NO: 9387 - DNA, 75 bp, synthetic construct
  misc_feature 1..75: note = Synthetic construct
  source 1..75: mol_type = other DNA
tcctatgtactgactcagccaccctcggtgtcagtggccccaggacagacggccaggattacctgtgggggaagc

SEQ ID NO: 9388 - DNA, 78 bp, synthetic construct
  misc_feature 1..78: note = Synthetic construct
  source 1..78: mol_type = other DNA
gacatccagatgacccagtctccatcctccctgtcagcctctgtaggagacagagtcaccatcacttgccgggcaagt

SEQ ID NO: 9389 - DNA, 78 bp, synthetic construct
  misc_feature 1..78: note = Synthetic construct
  source 1..78: mol_type = other DNA
gagattgtgttgacgcagtctccaggcaccctgtctttgtctccaggtgaccgagccaccatctcctgtagggccagt

SEQ ID NO: 9390 - DNA, 78 bp, synthetic construct
  misc_feature 1..78: note = Synthetic construct
  source 1..78: mol_type = other DNA
gacatccagatgacccagtctccttccaccctgtctgcatctgtaggggacagagtcaccatcacttgccgggccagt

SEQ ID NO: 9391 - DNA, 75 bp, synthetic construct
  misc_feature 1..75: note = Synthetic construct
  source 1..75: mol_type = other DNA
cagcctgtgctgactcaatcatcctctgcctctgcttccctgggatcctcggtcaagctcacctgcactctgagc

SEQ ID NO: 9392 - DNA, 78 bp, synthetic construct
  misc_feature 1..78: note = Synthetic construct
  source 1..78: mol_type = other DNA
gacatcgtgatgacccagtctccagactccctgtctgtgtctctgggcgagagggccaccatcaactgcaagtccagc

SEQ ID NO: 9393 - DNA, 78 bp, synthetic construct
  misc_feature 1..78: note = Synthetic construct
  source 1..78: mol_type = other DNA
gacatccagatgacccagtctccatcctccctgtcggcatctgtaggagacagagtcaccatcacctgccgggcgagt

SEQ ID NO: 9394 - DNA, 78 bp, synthetic construct
  misc_feature 1..78: note = Synthetic construct
  source 1..78: mol_type = other DNA
gtcatccagatgacccagtctccatcctcactgtctgcgtctgtaggagacagcgtcaccatcacttgccgggcgagt

SEQ ID NO: 9395 - DNA, 78 bp, synthetic construct
  misc_feature 1..78: note = Synthetic construct
  source 1..78: mol_type = other DNA
caaattgtgttgacacagtctccagccaccctgtctttgtctccaggggaaagagtcaccctctcctgcagggccagt

SEQ ID NO: 9396 - DNA, 75 bp, synthetic construct
  misc_feature 1..75: note = Synthetic construct
  source 1..75: mol_type = other DNA
caggctgtggtgactcaggagccctcgctgactgtgtcccctggagggacagtcactctcacctgtggctccagc

SEQ ID NO: 9397 - DNA, 75 bp, synthetic construct
  misc_feature 1..75: note = Synthetic construct
  source 1..75: mol_type = other DNA
cagtctgccctgactcagcctgcctccgtgtctgggtctcctggacagtcgatcaccatctcctggaatggaacc

SEQ ID NO: 9398 - DNA, 78 bp, synthetic construct
  misc_feature 1..78: note = Synthetic construct
  source 1..78: mol_type = other DNA
gacatccagatgacccagtctccatcctccctgtctgcatctgtaggagacagagtcaccatcacttgccaggcgagt

SEQ ID NO: 9399 - DNA, 78 bp, synthetic construct
  misc_feature 1..78: note = Synthetic construct
  source 1..78: mol_type = other DNA
gacatccagatgacccagtctccttccaccctgtctgcatctataggagacagagtcaccatcacttgccgggccagc

SEQ ID NO: 9400 - DNA, 78 bp, synthetic construct
  misc_feature 1..78: note = Synthetic construct
  source 1..78: mol_type = other DNA
gacattgtgatgactcagaccccgctctccctgtccgtcacccttggacaggcggcctccttctcctgcacgtctagt

SEQ ID NO: 9401 - DNA, 78 bp, synthetic construct
  misc_feature 1..78: note = Synthetic construct
  source 1..78: mol_type = other DNA
gaaattgtgttgacgcagtctccaggcaccctgtctttgtctccaggggaaagagccagtctctcctgcagggccagt

SEQ ID NO: 9402 - DNA, 75 bp, synthetic construct
  misc_feature 1..75: note = Synthetic construct
  source 1..75: mol_type = other DNA
cagtctgccctgactcagcctacctccgtgtctgggtctcctggacagtcgatcaccatctcctgcactgccacc

SEQ ID NO: 9403 - DNA, 78 bp, synthetic construct
  misc_feature 1..78: note = Synthetic construct
  source 1..78: mol_type = other DNA
tccatcgtgatgacccagtctccagagtccctagatgtgtctctgggcgagagggccaccatccactgcaagtccagc

SEQ ID NO: 9404 - DNA, 78 bp, synthetic construct
  misc_feature 1..78: note = Synthetic construct
  source 1..78: mol_type = other DNA
gaaatagtgttgacgcagtctccagccaccctgtctatgtctccaggggaaagagccaccctctcctgcagggccagt

SEQ ID NO: 9405 - DNA, 78 bp, synthetic construct
  misc_feature 1..78: note = Synthetic construct
  source 1..78: mol_type = other DNA
gaaatagtgatgacgcagtctccagtcaccctgtctgtgtctccaggggaaagagtcaccctctcctgtagggccaat

SEQ ID NO: 9406 - DNA, 75 bp, synthetic construct
  misc_feature 1..75: note = Synthetic construct
  source 1..75: mol_type = other DNA
tcctatgagctgacacagccaccctcggtgtcagtgtccccaggacaaccggccaggatcacctgctctggagat

SEQ ID NO: 9407 - DNA, 78 bp, synthetic construct
  misc_feature 1..78: note = Synthetic construct
  source 1..78: mol_type = other DNA
gacatccagttgacccaatctccatcctccctgtctgcatctgtaggagacagagtcaccatcacttgccaggcgagt

SEQ ID NO: 9408 - DNA, 78 bp, synthetic construct
  misc_feature 1..78: note = Synthetic construct
  source 1..78: mol_type = other DNA
gacatccagatgacccagtctccatcctcactgtctgcatctgtaggagacagagtcaccatcacttgtcgggcgagt

SEQ ID NO: 9409 - DNA, 78 bp, synthetic construct
  misc_feature 1..78: note = Synthetic construct
  source 1..78: mol_type = other DNA
gaaacagtgatgacgcagtctccagccaccctgtctgtgtctccaggggaaagagtcaccctctcctgcagggccagt

SEQ ID NO: 9410 - DNA, 78 bp, synthetic construct
  misc_feature 1..78: note = Synthetic construct
  source 1..78: mol_type = other DNA
gaaattgtgttgacgcagtctcctggcaccctgtctttgtctccaggacaaagagccaccctctcctgcagggccagt

SEQ ID NO: 9411 - DNA, 78 bp, synthetic construct
  misc_feature 1..78: note = Synthetic construct
  source 1..78: mol_type = other DNA
gaagttgtgctgactcagtctccagactttcagtctgtgactccaaaggagaaagtcaccatcacctgccgggccagt

SEQ ID NO: 9412 - DNA, 78 bp, synthetic construct
  misc_feature 1..78: note = Synthetic construct
  source 1..78: mol_type = other DNA
gacatccagatgacccagtctccatcttccgtgtctgcatctgtaggagacagagtcaccattacttgtcgggcgagt

SEQ ID NO: 9413 - DNA, 78 bp, synthetic construct
  misc_feature 1..78: note = Synthetic construct
  source 1..78: mol_type = other DNA
gacatccagatgacccagtctccatcctccctgtctgcatctgtgggagccagagtcaccttcacttgccgggcaagt

SEQ ID NO: 9414 - DNA, 78 bp, synthetic construct
  misc_feature 1..78: note = Synthetic construct
  source 1..78: mol_type = other DNA
gaaattgtgttgacgcagtctccaggcaccctgtctttgtctccaggggaaagagccaccctctcctgcagggccagc

SEQ ID NO: 9415 - DNA, 78 bp, synthetic construct
  misc_feature 1..78: note = Synthetic construct
  source 1..78: mol_type = other DNA
gacatccagatgacccagtctccatctgccatgtctgcatctgtaggagacagagtcaccatcacttgtcgggcgagt

SEQ ID NO: 9416 - DNA, 75 bp, synthetic construct
  misc_feature 1..75: note = Synthetic construct
  source 1..75: mol_type = other DNA
tcctatgacctgactcagccgccctccgtgtccgtgtcccctggacagagagccaccatcacctgctctggagat

SEQ ID NO: 9417 - DNA, 75 bp, synthetic construct
  misc_feature 1..75: note = Synthetic construct
  source 1..75: mol_type = other DNA
tcttctgagctgactcaggaccctgctgtgtctgtggccctgggccagacagtcaggatcgcatgccaaggagac

SEQ ID NO: 9418 - DNA, 78 bp, synthetic construct
  misc_feature 1..78: note = Synthetic construct
  source 1..78: mol_type = other DNA
gacatccagataacccagtctccatcctccctgtctgcatctgtaggagacagagtcaccatcacttgtcgggcgagt

SEQ ID NO: 9419 - DNA, 78 bp, synthetic construct
  misc_feature 1..78: note = Synthetic construct
  source 1..78: mol_type = other DNA
gacatccagatgacccagtctccatcctcactgtctgcatctgtaggagacagagtcaccatgacttgtcgggcgagt

SEQ ID NO: 9420 - DNA, 78 bp, synthetic construct
  misc_feature 1..78: note = Synthetic construct
  source 1..78: mol_type = other DNA
gagattgtgatgacccagactccgctctccttgtctatcacccctggagagcaggcctccatgtcctgcaggtctagt

SEQ ID NO: 9421 - DNA, 78 bp, synthetic construct
  misc_feature 1..78: note = Synthetic construct
  source 1..78: mol_type = other DNA
gacatcgtgatgacccagtctccagactccctggctgtgtctctgggcgaaagggccaccatcaactgcaagtccagc

SEQ ID NO: 9422 - DNA, 75 bp, synthetic construct
  misc_feature 1..75: note = Synthetic construct
  source 1..75: mol_type = other DNA
aattttatactgactcagccccactctgtgtccgagtctccggggaagacggtcaccatctcctgcacccgcagc

SEQ ID NO: 9423 - DNA, 75 bp, synthetic construct
  misc_feature 1..75: note = Synthetic construct
  source 1..75: mol_type = other DNA
cagtctgccctgactcagcctgcctccgtgtctgggtctcctggacagtcgatcaccatatcctgcactggaacc

SEQ ID NO: 9424 - DNA, 78 bp, synthetic construct; identical to SEQ ID NO: 1843
  misc_feature 1..78: note = Synthetic construct
  source 1..78: mol_type = other DNA

SEQ ID NO: 9425 - DNA, 78 bp, synthetic construct
  misc_feature 1..78: note = Synthetic construct
  source 1..78: mol_type = other DNA
gaaattgtattgacgcagtctccaggcaccctgtctttgtctccaggggaaagagccaccctctcctgcagggccagt

SEQ ID NO: 9426 - DNA, 75 bp, synthetic construct
  misc_feature 1..75: note = Synthetic construct
  source 1..75: mol_type = other DNA
cagactgtggtgacccaggagccatcgctctcagtgtcccctggagggacagtcacactcacttgtggcttgagg

SEQ ID NO: 9427 - DNA, 78 bp, synthetic construct
  misc_feature 1..78: note = Synthetic construct
  source 1..78: mol_type = other DNA
gatattgtgatgactcagtctccactctccctgcccgtcaccctaggccagtcggcctccatctcctgcaggtctagt

SEQ ID NO: 9428 - DNA, 75 bp, synthetic construct
  misc_feature 1..75: note = Synthetic construct
  source 1..75: mol_type = other DNA
cagactgtggtgacccaggagccatcgttctcagtgtcccctggagggacagtcacactcacttgtggcttaagc

SEQ ID NO: 9429 - DNA, 75 bp, synthetic construct
  misc_feature 1..75: note = Synthetic construct
  source 1..75: mol_type = other DNA
tcctatgagctgacacagccatcctcagtgtcagtgtctccgggacagacagccaggatcacctgctcaggagat

SEQ ID NO: 9430 - DNA, 78 bp, synthetic construct
  misc_feature 1..78: note = Synthetic construct
  source 1..78: mol_type = other DNA
gatattgtgatgactcagtctccactctccctgcccgtcacccctggagagccggcctccatctcctgcaggtctagt

SEQ ID NO: 9431 - DNA, 78 bp, synthetic construct
  misc_feature 1..78: note = Synthetic construct
  source 1..78: mol_type = other DNA
gacatccagatgacccagtctccatcctccctgtctgcatctataggggacagagtcaccatcacttgccggacaagt

SEQ ID NO: 9432 - DNA, 78 bp, synthetic construct
  misc_feature 1..78: note = Synthetic construct
  source 1..78: mol_type = other DNA
gatgttgtgatgactcagtctccactctccctgcccgtcagccttggacagccggcctccatctcctgcaggcccggt

SEQ ID NO: 9433 - DNA, 75 bp, synthetic construct
  misc_feature 1..75: note = Synthetic construct
  source 1..75: mol_type = other DNA
ccctatgttctgactcagccaccctcggtgtcggtggccccaggacagacggccaggattacctgtgggggaaac

SEQ ID NO: 9434 - DNA, 75 bp, synthetic construct
  misc_feature 1..75: note = Synthetic construct
  source 1..75: mol_type = other DNA
aaatttttgctgacccagccgcactctgtgtcggagtctccggggaagacattaaccatctcctgcacccgcagc

SEQ ID NO: 9435 - DNA, 78 bp, synthetic construct
  misc_feature 1..78: note = Synthetic construct
  source 1..78: mol_type = other DNA
gacatccagatgacccagtctccttcaaccctgtctgcatcgataggagacagagtcagcctcacttgccgggccagt

SEQ ID NO: 9436 - DNA, 78 bp, synthetic construct
  misc_feature 1..78: note = Synthetic construct
  source 1..78: mol_type = other DNA
gaaatagtgatgacgcagtctccaggcaccctgtctgtgtctccaggggacagagtcatcctctcctgcagggccagt

SEQ ID NO: 9437 - DNA, 78 bp, synthetic construct
  misc_feature 1..78: note = Synthetic construct
  source 1..78: mol_type = other DNA
gacatcgtgatgacccagactccagactccctggctgtgtctctgggcgagagggccaccatcaactgcaagtccagc

SEQ ID NO: 9438 - DNA, 75 bp, synthetic construct
  misc_feature 1..75: note = Synthetic construct
  source 1..75: mol_type = other DNA
tcctatgtgctgactcagccaccctcggtgtcagtggccccaggtcagacggccagaattacctgtgagggaacc

SEQ ID NO: 9439 - DNA, 75 bp, synthetic construct
  misc_feature 1..75: note = Synthetic construct
  source 1..75: mol_type = other DNA
cagcctgtgctgactcagccatcttcccattctgcatcttctggagcatcagtcagactcacctgcatggtgagc

SEQ ID NO: 9440 - DNA, 78 bp, synthetic construct
  misc_feature 1..78: note = Synthetic construct
  source 1..78: mol_type = other DNA
gacatccagctgacccagtctccatcttccgtgtctgcctctgtgggagacagagtcaccatgacttgtcggacgagt

SEQ ID NO: 9441 - DNA, 78 bp, synthetic construct
  misc_feature 1..78: note = Synthetic construct
  source 1..78: mol_type = other DNA
gacatcgtgatgacccagtctccagactccctggctgtgtctctgggcgagagggccaccatcaagtgcaagtccagc

SEQ ID NO: 9442 - DNA, 75 bp, synthetic construct
  misc_feature 1..75: note = Synthetic construct
  source 1..75: mol_type = other DNA
agtttcatgctgactcagtctcactctgtgtcggactctccggggaagacagttaccatctcctgcacccgcacc

SEQ ID NO: 9443 - DNA, 75 bp, synthetic construct
  misc_feature 1..75: note = Synthetic construct
  source 1..75: mol_type = other DNA
tcctatgtgctgactcaggcagcctcggtgtcagtcgccctaggacagacggccacaattccctgtgggggagac

SEQ ID NO: 9444 - DNA, 75 bp, synthetic construct
  misc_feature 1..75: note = Synthetic construct
  source 1..75: mol_type = other DNA
tcttctgagctgactcaggaccctgctgtgtctgtggccttgggacagacagtcacgatcacatgtcaaggagac

SEQ ID NO: 9445 - DNA, 78 bp, synthetic construct
  misc_feature 1..78: note = Synthetic construct
  source 1..78: mol_type = other DNA
gacatccagatgacccagtctccttccaccctgtctgcatctgtaggagacagagtcaccatcatttgccgggccagt

SEQ ID NO: 9446 - DNA, 78 bp, synthetic construct
  misc_feature 1..78: note = Synthetic construct
  source 1..78: mol_type = other DNA
gacatccagatgacccagtctccatccaccctgtctgcttctataggagacagagtcatcatcacttgtcgggccagt

SEQ ID NO: 9447 - DNA, 78 bp, synthetic construct
  misc_feature 1..78: note = Synthetic construct
  source 1..78: mol_type = other DNA
ggcatccagatgacccagtctccttccaccctgtctgcatctgtaggagacagagtcaccattacctgccgggccagt

SEQ ID NO: 9448 - DNA, 78 bp, synthetic construct
  misc_feature 1..78: note = Synthetic construct
  source 1..78: mol_type = other DNA
gatgttgtgatgactcagtctccactctccctgcccgtcacccttggacagccggcctccatctcctgcatgtctaat

SEQ ID NO: 9449 - DNA, 78 bp, synthetic construct
  misc_feature 1..78: note = Synthetic construct
  source 1..78: mol_type = other DNA
gacatccagatgacccagtctccatcctccctgtctgcatctgtaggagacacagtcaccatcacttgccgggcaagt

SEQ ID NO: 9450 - DNA, 75 bp, synthetic construct
  misc_feature 1..75: note = Synthetic construct
  source 1..75: mol_type = other DNA
tcttatgagctgacacagccaccctcggtgtcagtgtccccaggacagacggccaagatcacctgctctgcagat

SEQ ID NO: 9451 - DNA, 75 bp, synthetic construct
  misc_feature 1..75: note = Synthetic construct
  source 1..75: mol_type = other DNA
cagtctgtgctgacgcagccgccctcagtgtctggggccccagggcagagggtcaccctttcctgcactgggagc

SEQ ID NO: 9452 - DNA, 78 bp, synthetic construct
  misc_feature 1..78: note = Synthetic construct
  source 1..78: mol_type = other DNA
gacatccagctgacccagtctccatcctccctgtctgcatctgtcggagacagagtcaacatcacttgccggacaagt

SEQ ID NO: 9453 - DNA, 78 bp, synthetic construct
  misc_feature 1..78: note = Synthetic construct
  source 1..78: mol_type = other DNA
gaaattgtgttgacacagtccccaggcaccctgtctttgtctccaggggaaagagccaccctctcctgcagggccagt

SEQ ID NO: 9454 - DNA, 78 bp, synthetic construct
  misc_feature 1..78: note = Synthetic construct
  source 1..78: mol_type = other DNA
gacatccagatgacccagtctccgtcctcactgtctgcatctgttggagacagagtcaccatcacttgtcggtcgagt

SEQ ID NO: 9455 - DNA, 78 bp, synthetic construct
  misc_feature 1..78: note = Synthetic construct
  source 1..78: mol_type = other DNA
gaaatagtgatgacgcagtctccagccatcctgtctgtgtctccaggggaaagagccaccctctcctgcagggccagt

SEQ ID NO: 9456 - DNA, 78 bp, synthetic construct
  misc_feature 1..78: note = Synthetic construct
  source 1..78: mol_type = other DNA
gaaactgtgttgacacagtctccagccaccctgtctttgtctccaggggaaagagccaccctctcctgcagggccagt

SEQ ID NO: 9457 - DNA, 78 bp, synthetic construct
  misc_feature 1..78: note = Synthetic construct
  source 1..78: mol_type = other DNA
gacatccagatgacccagtctccatcttccgtgtctgcatctgtaggagacagagtcaccatcacttgtcgggcgagt

SEQ ID NO: 9458 - DNA, 75 bp, synthetic construct
  misc_feature 1..75: note = Synthetic construct
  source 1..75: mol_type = other DNA
tcctatgtgctgactcagccaccctcggtgtcagtggccccaggacagacggccagcattacctgtgggggaaac

SEQ ID NO: 9459 - DNA, 78 bp, synthetic construct
  misc_feature 1..78: note = Synthetic construct
  source 1..78: mol_type = other DNA
gaaattgtattgacacagtctccagccaccctgtctttgtctccaggggaaagagccaccctctcctgcagggccagt

SEQ ID NO: 9460 - DNA, 78 bp, synthetic construct
  misc_feature 1..78: note = Synthetic construct
  source 1..78: mol_type = other DNA
gccatccagttgacccagtctccatccttcctgtctgcatccgctggagacagagtcaccatcacttgccgggccagt

SEQ ID NO: 9461 - DNA, 78 bp, synthetic construct
  misc_feature 1..78: note = Synthetic construct
  source 1..78: mol_type = other DNA
gaaatagtgatgacgcagtctccagtcagcctgtctgtgtctccaggggaaagagccaccctctcctgcagggccagt

SEQ ID NO: 9462 - DNA, 78 bp, synthetic construct
  misc_feature 1..78: note = Synthetic construct
  source 1..78: mol_type = other DNA
gccatccggatgacccagtctccatcctcactctctgcatcgacaggagacagtgtcaccatcacttgtcgggcgagt

SEQ ID NO: 9463 - DNA, 78 bp, synthetic construct
  misc_feature 1..78: note = Synthetic construct
  source 1..78: mol_type = other DNA
gccgtccggatgacccagtctccttcttccctgtctgcatctacaggagacagagtcacaatcacttgtcgggcgagt

SEQ ID NO: 9464 - DNA, 75 bp, synthetic construct
  misc_feature 1..75: note = Synthetic construct
  source 1..75: mol_type = other DNA
tcatatgcgatgactcagccaccctcagtgtccgtgtccccaggacagacagccagcatcacctgttatggagat

SEQ ID NO: 9465 - DNA, 75 bp, synthetic construct
  misc_feature 1..75: note = Synthetic construct
  source 1..75: mol_type = other DNA
cagtctgccctgactcagcctgcctccgtgtctgggtctcctggacagtcgatctccatctcctgcactggatcc

SEQ ID NO: 9466 - DNA, 75 bp, synthetic construct
  misc_feature 1..75: note = Synthetic construct
  source 1..75: mol_type = other DNA
tatgatgagctggctcagccaccctcactgtccgtgtccccaggacggacagccaccatcacctgctctggagat

SEQ ID NO: 9467 - DNA, 78 bp, synthetic construct
  misc_feature 1..78: note = Synthetic construct
  source 1..78: mol_type = other DNA
gatgttgtgatgactcagtctcccctctccctgcccgtcacccttggacagccggcctccatctcctgcaggtctaat

SEQ ID NO: 9468 - DNA, 78 bp, synthetic construct
  misc_feature 1..78: note = Synthetic construct
  source 1..78: mol_type = other DNA
gacatcgtgatgacccagtctccagactccctggctgtgtctctgggcgagagggccaccatcacctgcaagtccagc

SEQ ID NO: 9469 - DNA, 78 bp, synthetic construct
  misc_feature 1..78: note = Synthetic construct
  source 1..78: mol_type = other DNA
gaaattgtgttgacgcagtctccaggcaccctgtctttgtctccaggggatagagccaccctctcctgcagggccagt

SEQ ID NO: 9470 - DNA, 75 bp, synthetic construct
  misc_feature 1..75: note = Synthetic construct
  source 1..75: mol_type = other DNA
cagactgtggtgacccaggagccatcgctctcagtgtcccctggaggggcagtgacgctcacttgtggcttgagc

SEQ ID NO: 9471 - DNA, 78 bp, synthetic construct
  misc_feature 1..78: note = Synthetic construct
  source 1..78: mol_type = other DNA
gacatccagatgacccagtctccctccaccctgtctgcatctgtgggagacacagtcaccatcacctgccgggccagt

SEQ ID NO: 9472 - DNA, 78 bp, synthetic construct
  misc_feature 1..78: note = Synthetic construct
  source 1..78: mol_type = other DNA
gacatcgtgttgacccagtctccagactccctggctgtgtctctgggcgagagggccaccatcaactgcaagtccagc

SEQ ID NO: 9473 - DNA, 78 bp, synthetic construct
  misc_feature 1..78: note = Synthetic construct
  source 1..78: mol_type = other DNA
gagattgtgatgacccagactccactctccttgtctatcacccctggagagcaggcctccatgtcctgcaggtctagt

SEQ ID NO: 9474 - DNA, 78 bp, synthetic construct
  misc_feature 1..78: note = Synthetic construct
  source 1..78: mol_type = other DNA
gacatccagatgacccagtctccatcttccgtgtctgcatctgtgggagacagagtcaccatcacttgtcgggcgagt

SEQ ID NO: 9475 - DNA, 78 bp, synthetic construct
  misc_feature 1..78: note = Synthetic construct
  source 1..78: mol_type = other DNA
gacatcgtgatgacccagtctccagagtccctggctgtgtctctgggcgagagggccaccatcaactgcaagtccagc

SEQ ID NO: 9476 - DNA, 75 bp, synthetic construct
  misc_feature 1..75: note = Synthetic construct
  source 1..75: mol_type = other DNA
cagtctgccctgactcagcctccctccgcgtccgggtctcctgaacagtcagtcaccatctcctgcactggaacc

SEQ ID NO: 9477 - DNA, 78 bp, synthetic construct
  misc_feature 1..78: note = Synthetic construct
  source 1..78: mol_type = other DNA
gaaatagtgatgacgcagtctccggccatcctgtctgtgtctccaggggaaacagccaccctctcctgcagggccagt

SEQ ID NO: 9478 - DNA, 75 bp, synthetic construct
  misc_feature 1..75: note = Synthetic construct
  source 1..75: mol_type = other DNA
cagtctgtgctgactcagccaccctcagcgtctggtacccccgggcagagggtcaccatctcttgttctggaagc

SEQ ID NO: 9479 - DNA, 75 bp, synthetic construct
  misc_feature 1..75: note = Synthetic construct
  source 1..75: mol_type = other DNA
cagtctgccctgactcagcctgcctccgtgtctgggtctcctggacagtcgatcaccatctcctgcactggaacg

SEQ ID NO: 9480 - DNA, 78 bp, synthetic construct
  misc_feature 1..78: note = Synthetic construct
  source 1..78: mol_type = other DNA
gacatccagatgacccagtctccttccaccctatctgcatctgttggagacagagtcaccatcacctgtcgggccagt

SEQ ID NO: 9481 - DNA, 75 bp, synthetic construct
  misc_feature 1..75: note = Synthetic construct
  source 1..75: mol_type = other DNA
cagtctgccctgactcagcctgcctccgtgtctgggtctcctggacagtcgataaccatctcctgcactggaacc

SEQ ID NO: 9482 - DNA, 78 bp, synthetic construct
  misc_feature 1..78: note = Synthetic construct
  source 1..78: mol_type = other DNA
gacatccagatgacccagtctccatcctcactgtctgcatctgttggagacagagtcaccatcacttgtcgggcgagt

SEQ ID NO: 9483 - DNA, 78 bp, synthetic construct
  misc_feature 1..78: note = Synthetic construct
  source 1..78: mol_type = other DNA
gaaacagtgatgacgcagtctccagccaccctgtctgtgtctccaggggatagagcccccctctcctgcagggccagt

SEQ ID NO: 9484 - DNA, 78 bp, synthetic construct
  misc_feature 1..78: note = Synthetic construct
  source 1..78: mol_type = other DNA
gaaatagtgatgacgcagtctccagccaccctgtctgtgtctgcaggggaaacagccaccctttcctgcagggccagt

SEQ ID NO: 9485 - DNA, 75 bp, synthetic construct
  misc_feature 1..75: note = Synthetic construct
  source 1..75: mol_type = other DNA
cagtctgccctgactcagcctgcctccgtgtttgggtctcctggacagtcgatcaccatctcctgcactggaacc

SEQ ID NO: 9486 - DNA, 78 bp, synthetic construct
  misc_feature 1..78: note = Synthetic construct
  source 1..78: mol_type = other DNA
gacatcgtgatgacccagtctccagactccctggctgtgtctctgggcgagagggccaccatcaactgcaggtccagc

SEQ ID NO: 9487 - DNA, 75 bp, synthetic construct
  misc_feature 1..75: note = Synthetic construct
  source 1..75: mol_type = other DNA
tcctctgtcctgactcagccaccctcggtgtcagtggccccggggcagacggccaggattccctgtgacttaaac

SEQ ID NO: 9488 - DNA, 78 bp, synthetic construct
  misc_feature 1..78: note = Synthetic construct
  source 1..78: mol_type = other DNA
gaaatagtgatgacgcagtctccagccaccctgtctgtgtctccaggggaaggagccgtactctcctgcagggccagt

SEQ ID NO: 9489 - DNA, 78 bp, synthetic construct
  misc_feature 1..78: note = Synthetic construct
  source 1..78: mol_type = other DNA
gaaatagtgatgacgcagtctccagccaccctgtctgtgtctccaggggaaagagtcaccctctcctgcagggccagt

SEQ ID NO: 9490 - DNA, 78 bp, synthetic construct
  misc_feature 1..78: note = Synthetic construct
  source 1..78: mol_type = other DNA
gaaattgtgttgacacagtctccagtcaccctgtctgtgtctccaggggaaagagccaccctctcctgcagggccagt

SEQ ID NO: 9491 - DNA, 78 bp, synthetic construct
  misc_feature 1..78: note = Synthetic construct
  source 1..78: mol_type = other DNA
gaaatagtgatgacgcagtctccagccaccctgtctgtgtctccaggagaaagagccaccctctcctgcagggccagt

SEQ ID NO: 9492 - DNA, 75 bp, synthetic construct
  misc_feature 1..75: note = Synthetic construct
  source 1..75: mol_type = other DNA
cagtctgtgttgacgcagccgccctcagtgtctgcgaccccaggacagaaggtcaccatctcctgctctggaagc

SEQ ID NO: 9493 - DNA, 78 bp, synthetic construct; identical to SEQ ID NO: 1842
  misc_feature 1..78: note = Synthetic construct
  source 1..78: mol_type = other DNA

SEQ ID NO: 9494 - DNA, 78 bp, synthetic construct
  misc_feature 1..78: note = Synthetic construct
  source 1..78: mol_type = other DNA
gacatccagatgaaccagtctccatcttcactgtctgcatctgttggagacagcgtcaccatcacttgtcgggcgagt

SEQ ID NO: 9495 - DNA, 78 bp, synthetic construct
  misc_feature 1..78: note = Synthetic construct
  source 1..78: mol_type = other DNA
gagatcgtcctgacccagtctccagactccctggctgtgtccctgggcgacagggccaccatcacctgcacctccaat

SEQ ID NO: 9496 - DNA, 75 bp, synthetic construct
  misc_feature 1..75: note = Synthetic construct
  source 1..75: mol_type = other DNA
tcctatgagctgactcagccaccctcagtgtccgtgtccccaggacagacagccagcatcacctgtattggagat

SEQ ID NO: 9497 - DNA, 78 bp, synthetic construct
  misc_feature 1..78: note = Synthetic construct
  source 1..78: mol_type = other DNA
gaagttgtgttgacacagtctccagccaccctgtctttgtctccaggggaaagagccaccctctcctgcagggccagt

SEQ ID NO: 9498 - DNA, 78 bp, synthetic construct
  misc_feature 1..78: note = Synthetic construct
  source 1..78: mol_type = other DNA
caaattgtgttgacacagtctccagccaccctgtctttgtctccaggggaaagagccaccctctcctgcagggccagt

SEQ ID NO: 9499 - DNA, 78 bp, synthetic construct
  misc_feature 1..78: note = Synthetic construct
  source 1..78: mol_type = other DNA
gatgttgacctgactcagtctccgctcgtcctgcccgtcgcccttggtcagccggcctccatctcctgcaaggctagt

SEQ ID NO: 9500 - DNA, 78 bp, synthetic construct
  misc_feature 1..78: note = Synthetic construct
  source 1..78: mol_type = other DNA
gacatccagatgacccagtctccatcctccctgtccgcatctgtaggggacaaagtcaccatcacttgccgggcaagt

SEQ ID NO: 9501 - DNA, 75 bp, synthetic construct
  misc_feature 1..75: note = Synthetic construct
  source 1..75: mol_type = other DNA
cagtctgtgttgactcagccaccctcagcgtctgggacccccgggcagagggtctctatttcttgtcatggaagc

SEQ ID NO: 9502 - DNA, 75 bp, synthetic construct
  misc_feature 1..75: note = Synthetic construct
  source 1..75: mol_type = other DNA
caggcagggctgactcagccaccctcggtgtccaagggcttgagacagaccgccacactcacctgcactgggaac

SEQ ID NO: 9503 - DNA, 78 bp, synthetic construct
  misc_feature 1..78: note = Synthetic construct
  source 1..78: mol_type = other DNA
gacatccagatgacccagtctccttccaccctgtctgcatctgttggagacagagtcaccatcacttgccgggccagt

SEQ ID NO: 9504 - DNA, 78 bp, synthetic construct
  misc_feature 1..78: note = Synthetic construct
  source 1..78: mol_type = other DNA
gaaatagtgatgacgcagtctccagccaccctgtcagtgtctccaggggaaagagccaccctctcctgctgggccggt

SEQ ID NO: 9505 - DNA, 78 bp, synthetic construct
  misc_feature 1..78: note = Synthetic construct
  source 1..78: mol_type = other DNA
gacattgtgctgactcagtctccactctccctgcccgtcacccctggagagccggcctccctctcctgcaagtcttcg

SEQ ID NO: 9506 - DNA, 78 bp, synthetic construct
  misc_feature 1..78: note = Synthetic construct
  source 1..78: mol_type = other DNA
gacatccagatgacccagtctccatcttccgtgtctgcatctgttggagacaaagtcaccttcacttgtcgggcgagt

SEQ ID NO: 9507 - DNA, 75 bp, synthetic construct; identical to SEQ ID NO: 1845
  misc_feature 1..75: note = Synthetic construct
  source 1..75: mol_type = other DNA

SEQ ID NO: 9508 - DNA, 78 bp, synthetic construct
  misc_feature 1..78: note = Synthetic construct
  source 1..78: mol_type = other DNA
gacatccagttgacccagtctccatcctccctgtctgcatctgtaggagacagagtcaccatcacttgccgggcaagt

SEQ ID NO: 9509 - DNA, 78 bp, synthetic construct
  misc_feature 1..78: note = Synthetic construct
  source 1..78: mol_type = other DNA
gtcatccggatgacccagtctccatcgtcactctctgcatctacgggagacagagtcaccatcacttgtcgggcgagt

SEQ ID NO: 9510 - DNA, 78 bp, synthetic construct
  misc_feature 1..78: note = Synthetic construct
  source 1..78: mol_type = other DNA
ggcatcgtgatgacccagtctccagactccctgactgtgtctctgggcgagagggccaccatcaactgcaagtccaac

SEQ ID NO: 9511 - DNA, 75 bp, synthetic construct
  misc_feature 1..75: note = Synthetic construct
  source 1..75: mol_type = other DNA
cagtctgtcctgactcagcctccctccgcgtccgggtctcctggacagtcagtcaccatctcctgcactggagcc

SEQ ID NO: 9512 - DNA, 78 bp, synthetic construct
  misc_feature 1..78: note = Synthetic construct
  source 1..78: mol_type = other DNA
gacatcgtgttgacccagtctccagactccctggctgtgtctctgggcgagagggccaccatcagttgcaagtccagt

SEQ ID NO: 9513 - DNA, 78 bp, synthetic construct
  misc_feature 1..78: note = Synthetic construct
  source 1..78: mol_type = other DNA
gacatccagatgacccagtctccttccaccctgtctgcctctgtaggagacagagtcagcatcacttgccgggccagt

SEQ ID NO: 9514 - DNA, 78 bp, synthetic construct
  misc_feature 1..78: note = Synthetic construct
  source 1..78: mol_type = other DNA
gacatccagatgacccagtctccttccaccctgtctgcatcggtaggagacagagtctccatcacttgccgggccagt

SEQ ID NO: 9515 - DNA, 78 bp, synthetic construct
  misc_feature 1..78: note = Synthetic construct
  source 1..78: mol_type = other DNA
gacatccagatgacccagtctccatcctccctgtctgcatctgtaggagacagagtcacgatcacttgccgggcaagt

SEQ ID NO: 9516 - DNA, 75 bp, synthetic construct
  misc_feature 1..75: note = Synthetic construct
  source 1..75: mol_type = other DNA
acctatgtactgactcagccaccctcagtgtcagtggccccaggaatgacggccaggattacctgtgggggagac

SEQ ID NO: 9517 - DNA, 75 bp, synthetic construct
  misc_feature 1..75: note = Synthetic construct
  source 1..75: mol_type = other DNA
cagtctgtgttgacacagccgccctcagtgtctgcgtccccaggacagaaggtcaccatctcctgctctggaacc

SEQ ID NO: 9518 - DNA, 78 bp, synthetic construct
  misc_feature 1..78: note = Synthetic construct
  source 1..78: mol_type = other DNA
aaaattgtgttgacgcagtctccaggcaccctgtctttgtctccaggggaaagagccaccctctcctgcagggccagt

SEQ ID NO: 9519 - DNA, 78 bp, synthetic construct
  misc_feature 1..78: note = Synthetic construct
  source 1..78: mol_type = other DNA
gaaattgtgttgacacagtctccaggcaccctgtctttgtctccaggggaaggagccagcctctcctgcagggccagt

SEQ ID NO: 9520 - DNA, 78 bp, synthetic construct; identical to SEQ ID NO: 1841
  misc_feature 1..78: note = Synthetic construct
  source 1..78: mol_type = other DNA

SEQ ID NO: 9521 - DNA, 78 bp, synthetic construct
  misc_feature 1..78: note = Synthetic construct
  source 1..78: mol_type = other DNA
gagattgtgttgacgcagtcgccaggcaccctgtcggtgactccaggacaaaaagccagcgtctcctgcagggccagt

SEQ ID NO: 9522 - DNA, 78 bp, synthetic construct
  misc_feature 1..78: note = Synthetic construct
  source 1..78: mol_type = other DNA
gacatccagatgacccagtctccatcctccctgtcagcatctgtaggcgacagagtcaccatcacttgccgggcgagt

SEQ ID NO: 9523 - DNA, 78 bp, synthetic construct
  misc_feature 1..78: note = Synthetic construct
  source 1..78: mol_type = other DNA
gacatccagatgacccagtctccatcctccctgtctgcatctgtcggagacagaatcaccatcacttgccgggcaagt

SEQ ID NO: 9524 - DNA, 78 bp, synthetic construct
  misc_feature 1..78: note = Synthetic construct
  source 1..78: mol_type = other DNA
gaaattgtgttgacacagtctccagccaccctgtctttgtctccaggggacagagccaccctctcctgcagggccagt

SEQ ID NO: 9525 - DNA, 75 bp, synthetic construct
  misc_feature 1..75: note = Synthetic construct
  source 1..75: mol_type = other DNA
ccctatgtgctgactcaaccaccctcactgtcagtggccccagggaagacggccaggatttcctgtgggggagac

SEQ ID NO: 9526 - DNA, 75 bp, synthetic construct
  misc_feature 1..75: note = Synthetic construct
  source 1..75: mol_type = other DNA
ctatctgtgttgacgcagccgccctcagtgtctgcggccccaggacagaaggtctccatctcctgctctggaagc

SEQ ID NO: 9527 - DNA, 75 bp, synthetic construct
  misc_feature 1..75: note = Synthetic construct
  source 1..75: mol_type = other DNA
cagtctgtgttgacgcagccgccctccgtgtctgcggccccaggacagaatgtcaccatctcctgctctggaagc

SEQ ID NO: 9528 - DNA, 78 bp, synthetic construct
  misc_feature 1..78: note = Synthetic construct
  source 1..78: mol_type = other DNA
gacatcgtgatgacccagtctccagactccctggctgtgtctctgggcgagcgggccaccatcaactgcaagtccagc

SEQ ID NO: 9529 - DNA, 75 bp, synthetic construct
  misc_feature 1..75: note = Synthetic construct
  source 1..75: mol_type = other DNA
cagtctgtcctgactcagccgccctcagcgtctgggacccccgggctgagggtcaccgtctcttgttctggaagc

SEQ ID NO: 9530 - DNA, 78 bp, synthetic construct
  misc_feature 1..78: note = Synthetic construct
  source 1..78: mol_type = other DNA
gacatccagatgacccagtctccatcctccctgtctgtgtctctaggagaaagagtcaccatcacttgccaggcgagt

SEQ ID NO: 9531 - DNA, 75 bp, synthetic construct
  misc_feature 1..75: note = Synthetic construct
  source 1..75: mol_type = other DNA
cagtctgccctgactcagcctccctccgcgtccgggtctcttggacagtcagtcaccatctcctgcagtggagcc

SEQ ID NO: 9532 - DNA, 78 bp, synthetic construct
  misc_feature 1..78: note = Synthetic construct
  source 1..78: mol_type = other DNA
gaaattgtggtgacgcaatctccaggcaccctgtctttgtctccaggggagagagccaccctctcctgcagggccagt

SEQ ID NO: 9533 - DNA, 78 bp, synthetic construct
  misc_feature 1..78: note = Synthetic construct
  source 1..78: mol_type = other DNA
gaaactgtgttaacgcagtctccagacaccctgtctttgactccaggggaaagagccaccctctcctgcaggcccagt

SEQ ID NO: 9534 - DNA, 75 bp, synthetic construct
  misc_feature 1..75: note = Synthetic construct
  source 1..75: mol_type = other DNA
tcctatgtgctgactcaggcaccctcggtgtcagtggccccaggacagacggccaggattacctgtgggggaaac

SEQ ID NO: 9535 - DNA, 78 bp, synthetic construct
  misc_feature 1..78: note = Synthetic construct
  source 1..78: mol_type = other DNA
gagattgtggtgacccagactccactctccttgtctatcacccctggagagcaggcctccatgtcctgcaggtctagt

SEQ ID NO: 9536 - DNA, 78 bp, synthetic construct
  misc_feature 1..78: note = Synthetic construct
  source 1..78: mol_type = other DNA
gacatcgttgtgacccagtctccagcctccctggctgtgtctctgggcgagagggccaccatcaactgcaagtccact

SEQ ID NO: 9537 - DNA, 78 bp, synthetic construct
  misc_feature 1..78: note = Synthetic construct
  source 1..78: mol_type = other DNA
gacatccagatgacccagtctccatcctccctgtctgcatctgttggagacagagtcaccatcacttgccgggcaagt

SEQ ID NO: 9538 - DNA, 78 bp, synthetic construct
  misc_feature 1..78: note = Synthetic construct
  source 1..78: mol_type = other DNA
gccatccagttgacccagtctccattctccctgtctgcatctgttggagacagagtcaccatcgcttgccgggccagt

SEQ ID NO: 9539 - DNA, 75 bp, synthetic construct
  misc_feature 1..75: note = Synthetic construct
  source 1..75: mol_type = other DNA
cagtctgtggtgacggagccgccctcagtgtctgcggccccaggacagaaggtcaccatctcctgctctggaagc

SEQ ID NO: 9540 - DNA, 75 bp, synthetic construct
  misc_feature 1..75: note = Synthetic construct
  source 1..75: mol_type = other DNA
cagtctgccctgactcagcctgcctccgtgtctgggtctcctggacagtcgatcaccatctcctgcattggaacc

SEQ ID NO: 9541 - DNA, 78 bp, synthetic construct
  misc_feature 1..78: note = Synthetic construct
  source 1..78: mol_type = other DNA
gacatcgagatgacccagtctccatcttccatgtctgcatctgtaggagacagcgtcaccatcacttgtcgggcgagc

SEQ ID NO: 9542 - DNA, 75 bp, synthetic construct
  misc_feature 1..75: note = Synthetic construct
  source 1..75: mol_type = other DNA
cagtctgtggtgactcagccaccctcagcgtctgggacccccgggcagagggtcaccttctcttgttctggaagc

SEQ ID NO: 9543 - DNA, 78 bp, synthetic construct
  misc_feature 1..78: note = Synthetic construct
  source 1..78: mol_type = other DNA
gatattgtgatgacccaggctccactctctctgtccgtcacccctggacaggcggcctccatctcctgcaagtccagt

SEQ ID NO: 9544 - DNA, 75 bp, synthetic construct
  misc_feature 1..75: note = Synthetic construct
  source 1..75: mol_type = other DNA
cagtctgtgttgacgcagtcgccctcagtgtctgcggccccaggacagaaggtcaccatctcctgctctggaggc

SEQ ID NO: 9545 - DNA, 75 bp, synthetic construct
  misc_feature 1..75: note = Synthetic construct
  source 1..75: mol_type = other DNA
cagtctgtgctgactcagccaccctcagcgtctgggacccccgggcagagggtcaccatctcttgttctggaagg

SEQ ID NO: 9546 - DNA, 78 bp, synthetic construct
  misc_feature 1..78: note = Synthetic construct
  source 1..78: mol_type = other DNA
gaaactgtgttgacgcagtctccaggcaccctgtctttgtctccaggggaaagagccgccctctcctgcagggccagt

SEQ ID NO: 9547 - DNA, 78 bp, synthetic construct
  misc_feature 1..78: note = Synthetic construct
  source 1..78: mol_type = other DNA
gaaacgacactcacgcagtccccagcattcatgtcagcgactccaggagacaaagtcaacatctcctgcaaagccacc

SEQ ID NO: 9548 - DNA, 78 bp, synthetic construct
  misc_feature 1..78: note = Synthetic construct
  source 1..78: mol_type = other DNA
gacatccagatgacccagtctccctcctccctgtctgcatctgtaggagacagagtcaccatcacttgccgggcaagt

SEQ ID NO: 9549 - DNA, 78 bp, synthetic construct
  misc_feature 1..78: note = Synthetic construct
  source 1..78: mol_type = other DNA
gacatccagatgacccagtctccatcctccctgtctgcatctgttggagacagtgtcaccgtcacttgccgggcgagt

SEQ ID NO: 9550 - DNA, 75 bp, synthetic construct
  misc_feature 1..75: note = Synthetic construct
  source 1..75: mol_type = other DNA
cagtctgccttgactcagactgcctccgtgtctgggtctcctggacagtcgatcaccatctcctgcactggaacc

SEQ ID NO: 9551 - DNA, 78 bp, synthetic construct
  misc_feature 1..78: note = Synthetic construct
  source 1..78: mol_type = other DNA
gacatccggatgacccagtctccatcctccctgtctgcatctgtgggagacacagtcaccatcacttgccgggcaagt

SEQ ID NO: 9552 - DNA, 75 bp, synthetic construct
  misc_feature 1..75: note = Synthetic construct
  source 1..75: mol_type = other DNA
tcctatgaggtgacacagccaccctcggtgtcagtgtccccaggacagacggccaagatcacctgctctggagat

SEQ ID NO: 9553 - DNA, 78 bp, synthetic construct
  misc_feature 1..78: note = Synthetic construct
  source 1..78: mol_type = other DNA
gacatccagatgacgcagtctccagcctccctgtctgcatctgttggcgacagggtcaccctcacctgccaggcgagt

SEQ ID NO: 9554 - DNA, 75 bp, synthetic construct
  misc_feature 1..75: note = Synthetic construct
  source 1..75: mol_type = other DNA
tcctatgtgctgactcagccaccctcggtgtcagtggccccaggacagacggccaggattacctgtgggggagac

SEQ ID NO: 9555 - DNA, 75 bp, synthetic construct
  misc_feature 1..75: note = Synthetic construct
  source 1..75: mol_type = other DNA
cagtctgccctgactcagcctgcctccgtgtctgggtcgccgggacagtcgatcaccatctcctgcactggaacc

SEQ ID NO: 9556 - DNA, 78 bp, synthetic construct
  misc_feature 1..78: note = Synthetic construct
  source 1..78: mol_type = other DNA
gatgtagtgatgacacagtctccagccaccctgtctgtgtctccaggggaatcagccaccctctcctgcagggccagt

SEQ ID NO: 9557 - DNA, 78 bp, synthetic construct
  misc_feature 1..78: note = Synthetic construct
  source 1..78: mol_type = other DNA
gacatccagatgacccagtctccatcctccctgtctgcgtctgtaggagacagagtcaccatcacttgccgggcaagt

SEQ ID NO: 9558 - DNA, 75 bp, synthetic construct
  misc_feature 1..75: note = Synthetic construct
  source 1..75: mol_type = other DNA
cagtctgttctgacgcagccgccctcagtgtctggggccccaggacagagggtcaccatctcctgcactgggagt

SEQ ID NO: 9559 - DNA, 75 bp, synthetic construct
  misc_feature 1..75: note = Synthetic construct
  source 1..75: mol_type = other DNA
tcttctgagctgactcaggaccctgctatgtctgtggccgtgggacagcaagtcaccatcacatgccacggagac

SEQ ID NO: 9560 - DNA, 78 bp, synthetic construct
  misc_feature 1..78: note = Synthetic construct
  source 1..78: mol_type = other DNA
gacatccagatgacccagtctccctcttccgtgtctgcatctgttggagacagagtcaccatcacttgtcgggcgagt

SEQ ID NO: 9561 - DNA, 78 bp, synthetic construct
  misc_feature 1..78: note = Synthetic construct
  source 1..78: mol_type = other DNA
gaaattgtgctgactcagtctccagactttcagtctgtgactccaaaggagaaagtcaccatcacctgccgggccagt

SEQ ID NO: 9562 - DNA, 78 bp, synthetic construct
  misc_feature 1..78: note = Synthetic construct
  source 1..78: mol_type = other DNA
gacatccagatgacccagtctccttccatcctgtctgcatctgtaggagacagagtcaccatcacttgccgggccagt

SEQ ID NO: 9563 - DNA, 78 bp, synthetic construct
  misc_feature 1..78: note = Synthetic construct
  source 1..78: mol_type = other DNA
gaaattgtgttgacgcagtctccaggcaccttgtctttgtctccaggggacagagccaccctctcctgcagggccagt

SEQ ID NO: 9564 - DNA, 78 bp, synthetic construct
  misc_feature 1..78: note = Synthetic construct
  source 1..78: mol_type = other DNA
gacatccagatgacccagtctccagcctccctgtctgcatctgtgggagacagagtaaccatcacttgccgggcgagt

SEQ ID NO: 9565 - DNA, 75 bp, synthetic construct
  misc_feature 1..75: note = Synthetic construct
  source 1..75: mol_type = other DNA
cagcctgtcctgactcagccaccttcctcctccgcatctcctggagaatccgccagactcacctgcaccttgccc

SEQ ID NO: 9566 - DNA, 78 bp, synthetic construct
  misc_feature 1..78: note = Synthetic construct
  source 1..78: mol_type = other DNA
gacatccagatgacccagtctccatcctccctgtctgcgtctgtaggagacagagtcagcatcacttgccaggcgagt

SEQ ID NO: 9567 - DNA, 78 bp, synthetic construct
  misc_feature 1..78: note = Synthetic construct
  source 1..78: mol_type = other DNA
gacattcagatgacccagtctccatcttccgtgtctgcatctgtaggagacagggtcaccatctcttgtcgggcgagt

SEQ ID NO: 9568 - DNA, 78 bp, synthetic construct
  misc_feature 1..78: note = Synthetic construct
  source 1..78: mol_type = other DNA
gaaattgtgttgacacagtctccagtcaccctgtctttgtctccaggggaaagagccaccctctcctgcagggccagt

SEQ ID NO: 9569 - DNA, 75 bp, synthetic construct
  misc_feature 1..75: note = Synthetic construct
  source 1..75: mol_type = other DNA
cagtctgtgttgacgcagccgccctcagtgtctgcggccccaggacaggaggtcaccatctcctgctctggaaac

SEQ ID NO: 9570 - DNA, 36 bp, synthetic construct
  misc_feature 1..36: note = Synthetic construct
  source 1..36: mol_type = other DNA
cagtctgccctgactcagcctgcctccgtgtccggg

SEQ ID NO: 9571 - DNA, 75 bp, synthetic construct
  misc_feature 1..75: note = Synthetic construct
  source 1..75: mol_type = other DNA
tcctatgtgctgactcagccaccctcagtgtcagtggccccaggaaagacggccaggattacctgtggaggaaac

SEQ ID NO: 9572 - DNA, 75 bp, synthetic construct
  misc_feature 1..75: note = Synthetic construct
  source 1..75: mol_type = other DNA
cagtctgtgctgactcagccaccctcagcgtctgggacccccgggcagagggtcaccgtctcttgctctggaagc

SEQ ID NO: 9573 - DNA, 75 bp, synthetic construct
  misc_feature 1..75: note = Synthetic construct
  source 1..75: mol_type = other DNA
cagtctgtgctgacgcagccgccctcagtgtccggggccgcagggcagagggtcaccatctcctgcactgggagc

SEQ ID NO: 9574 - DNA, 75 bp, synthetic construct
  misc_feature 1..75: note = Synthetic construct
  source 1..75: mol_type = other DNA
cagtctgtggtgactcagccaccctcagtgtctgggacccccggacagagggtctccatctcttgttctggaagc

SEQ ID NO: 9575 - DNA, 78 bp, synthetic construct
  misc_feature 1..78: note = Synthetic construct
  source 1..78: mol_type = other DNA
gacatccagatgacccagtctccatcctccctgtctgcatctataggagacagagtcaccatcacttgccgggcaagt

SEQ ID NO: 9576 - DNA, 75 bp, synthetic construct
  misc_feature 1..75: note = Synthetic construct
  source 1..75: mol_type = other DNA
tcctatgtgctgactcagccaccctcggtgtcagtggccccaggacagacggccaggatcacctgtgggggaaac

SEQ ID NO: 9577 - DNA, 75 bp, synthetic construct
  misc_feature 1..75: note = Synthetic construct
  source 1..75: mol_type = other DNA
cagtctgtgttgacgcagccgccctcagtgtctgcggccccaggacagaaggtcaccatctcctgctctggaaac

SEQ ID NO: 9578 - DNA, 75 bp, synthetic construct
  misc_feature 1..75: note = Synthetic construct
  source 1..75: mol_type = other DNA
cagtctgccctgactcagcctgcctccgtgtctgggtctcctggacactcgatcaccatctcctgcactggaacc

SEQ ID NO: 9579 - DNA, 78 bp, synthetic construct
  misc_feature 1..78: note = Synthetic construct
  source 1..78: mol_type = other DNA
gaaagtgtgttgacgcagtctccaggcaccctgtctgtgtctccaggggaaagagccaccctctcctgcagggccagt

SEQ ID NO: 9580 - DNA, 78 bp, synthetic construct
  misc_feature 1..78: note = Synthetic construct
  source 1..78: mol_type = other DNA
gacattgtgatgactcagacccctcgcgccctgaccgtcagtccgggcgagccggcctccatctcctgcaggtccagc

SEQ ID NO: 9581 - DNA, 78 bp, synthetic construct
  misc_feature 1..78: note = Synthetic construct
  source 1..78: mol_type = other DNA
gacatccagctgacccagtctccatcctccctgcctgcgtctattggagacacagtcaccatcacttgccgggcgagt

SEQ ID NO: 9582 - DNA, 78 bp, synthetic construct
  misc_feature 1..78: note = Synthetic construct
  source 1..78: mol_type = other DNA
aatattgtgatgactcagtctccattttccctgtccgtcacccctggagaggcggcctccatctcctgcaggtctagt

SEQ ID NO: 9583 - DNA, 78 bp, synthetic construct
  misc_feature 1..78: note = Synthetic construct
  source 1..78: mol_type = other DNA
gacatccagatgacccagtctccatcctccctgtctgcatttgttggagacagagtcaccatcacttgccaggcgagt

SEQ ID NO: 9584 - DNA, 75 bp, synthetic construct
  misc_feature 1..75: note = Synthetic construct
  source 1..75: mol_type = other DNA
cagtctgccctgactcaggctgcctccgtgtctgggtctcctggacagtcgatcaccatctcctgcactggaacc

SEQ ID NO: 9585 - DNA, 78 bp, synthetic construct
  misc_feature 1..78: note = Synthetic construct
  source 1..78: mol_type = other DNA
gccatccggataacccagtctccatcctcactctctgcatctacaggaggcagagtcaccatcacttgtcgggcgagt

SEQ ID NO: 9586 - DNA, 78 bp, synthetic construct
  misc_feature 1..78: note = Synthetic construct
  source 1..78: mol_type = other DNA
gacatcgtgatgacccagtctccagcctccctggctgtgtctctgggcgagagggccaccatcaactgcaagtccagc

SEQ ID NO: 9587 - DNA, 78 bp, synthetic construct
  misc_feature 1..78: note = Synthetic construct
  source 1..78: mol_type = other DNA
gccatccggatgactcagtctccatcctcactctctgcatctacaggagacagagtcaccatcacttgtcgggcgagt

SEQ ID NO: 9588 - DNA, 78 bp, synthetic construct
  misc_feature 1..78: note = Synthetic construct
  source 1..78: mol_type = other DNA
gacatccagatgacccagtctccatctgccatatctgcatctgttggagacagagtcaccatcacttgtcgggcgagt

SEQ ID NO: 9589 - DNA, 78 bp, synthetic construct
  misc_feature 1..78: note = Synthetic construct
  source 1..78: mol_type = other DNA
gaaatagtgatgacgcagtctctagccaccctgtctgtgtctcgaggggaaagagccaccctctcctgcagggccagt

SEQ ID NO: 9590 - DNA, 75 bp, synthetic construct
  misc_feature 1..75: note = Synthetic construct
  source 1..75: mol_type = other DNA
cagcttgtgctgagtcaatcgccctctgcctctgcctccctgggagcctcggtcaaactcacctgcactctgagc

SEQ ID NO: 9591 - DNA, 75 bp, synthetic construct
  misc_feature 1..75: note = Synthetic construct
  source 1..75: mol_type = other DNA
cagtctgtgctgacgcagccgccctcagtgtctggggccccagggcagagggtcaccatctcctgcaatgggagc

SEQ ID NO: 9592 - DNA, 78 bp, synthetic construct
  misc_feature 1..78: note = Synthetic construct
  source 1..78: mol_type = other DNA
gccatccagttgacccagtctccatcctccctgtctgcatctgttggagacagagtcaccatcacttgccgggcaagt

SEQ ID NO: 9593 - DNA, 75 bp, synthetic construct
  misc_feature 1..75: note = Synthetic construct
  source 1..75: mol_type = other DNA
cagactgtggtgactcaggagccctcactgactgtgtccccaggagggacagtcactctcacctgtgcttccagc

SEQ ID NO: 9594 - DNA, 78 bp, synthetic construct
  misc_feature 1..78: note = Synthetic construct
  source 1..78: mol_type = other DNA
gacatccagatgacccagtctccttccaccctgtctccatctgtaggagacagagtcactatcacttgtcgggccagt

SEQ ID NO: 9595 - DNA, 78 bp, synthetic construct
  misc_feature 1..78: note = Synthetic construct
  source 1..78: mol_type = other DNA
ggcatccagatgacccagtctccttcctccctgtctgcatctgttggagacagagtcaccatcacttgccaggcgagt

SEQ ID NO: 9596 - DNA, 78 bp, synthetic construct
  misc_feature 1..78: note = Synthetic construct
  source 1..78: mol_type = other DNA
gacttccagatgacccagtctccatcctccctgtctgcatctgtaggagacagaatcaccatctcttgccgggcaact

SEQ ID NO: 9597 - DNA, 78 bp, synthetic construct
  misc_feature 1..78: note = Synthetic construct
  source 1..78: mol_type = other DNA
gacatccagatgacccagtctccttccgccctgtctgcatctgtaggagacagagtcaccatcacttgccgggccagt

SEQ ID NO: 9598 - DNA, 78 bp, synthetic construct
  misc_feature 1..78: note = Synthetic construct
  source 1..78: mol_type = other DNA
gacatccagatgacccagtctccatcctccctgtctgcttctgtaggcgaaagagtcaccatcacttgccgggcgagt

SEQ ID NO: 9599 - DNA, 78 bp, synthetic construct
  misc_feature 1..78: note = Synthetic construct
  source 1..78: mol_type = other DNA
gacatccagatgacccagtctccatcctccctgtctgcatctgtaggagacagagtcaccatcacttgccgggcaggt

SEQ ID NO: 9600 - DNA, 78 bp, synthetic construct
  misc_feature 1..78: note = Synthetic construct
  source 1..78: mol_type = other DNA
gaaattgtgttgacacagtctccagccaccctgtctttgtctccaggggagagagccaccctctcatgcagggccagt

SEQ ID NO: 9601 - DNA, 75 bp, synthetic construct
  misc_feature 1..75: note = Synthetic construct
  source 1..75: mol_type = other DNA
tccgatgaactgactcagccaccctcagtgtccgtgtccccagggcagacagccaccatcacctgctctggagat

SEQ ID NO: 9602 - DNA, 78 bp, synthetic construct
  misc_feature 1..78: note = Synthetic construct
  source 1..78: mol_type = other DNA
gacatcgtgatgacccagtctcctgactccctggctgtgtctctgggcgagagggccaccatcaactgcaggtccagc

SEQ ID NO: 9603 - DNA, 75 bp, synthetic construct
  misc_feature 1..75: note = Synthetic construct
  source 1..75: mol_type = other DNA
cagtctgttttgactcagccaccctcagcgtctgggacccccggacagagggtcaccatctcttgttctggaagc

SEQ ID NO: 9604 - DNA, 75 bp, synthetic construct
  misc_feature 1..75: note = Synthetic construct
  source 1..75: mol_type = other DNA
cagtctgtattgacgcagccgccctcagtgtctgcggccccaggacagaaggtcaccatctcctgctctggaaac

SEQ ID NO: 9605 - DNA, 78 bp, synthetic construct
  misc_feature 1..78: note = Synthetic construct
  source 1..78: mol_type = other DNA
gccatccagttgacccagtctccctcctccctgtctgcatctgtgggagacagagtcaccatcacttgccgggccagt

SEQ ID NO: 9606 - DNA, 78 bp, synthetic construct
  misc_feature 1..78: note = Synthetic construct
  source 1..78: mol_type = other DNA
gacatccagatgacccagtctccatcctccctgtctgcatctgtaggagacagagtcaccctcacttgccgggcaagt

SEQ ID NO: 9607 - DNA, 78 bp, synthetic construct
  misc_feature 1..78: note = Synthetic construct
  source 1..78: mol_type = other DNA
gatattgtgttgacgcagtctcccggcaccctgtctttgtctccaggggaaagagccaccctctcctgcagggccagt

SEQ ID NO: 9608 - DNA, 78 bp, synthetic construct
  misc_feature 1..78: note = Synthetic construct
  source 1..78: mol_type = other DNA
gacatccagatgacccagtctccttccaccctgtctgcttctgtaggagacagagtcaccatcacttgccgggccagt

SEQ ID NO: 9609 - DNA, 78 bp, synthetic construct
  misc_feature 1..78: note = Synthetic construct
  source 1..78: mol_type = other DNA
gacatccagatgacccagtctccatcctccctgtctgcatctgtaggagacagagtcaccatcgcttgccgggcaagt

SEQ ID NO: 9610 - DNA, 75 bp, synthetic construct
  misc_feature 1..75: note = Synthetic construct
  source 1..75: mol_type = other DNA
cagtctgttctgacgcagccgccctcagtgtctggggccccagggcagagggtcaccatctcctgcattgggagc

SEQ ID NO: 9611 - DNA, 78 bp, synthetic construct
  misc_feature 1..78: note = Synthetic construct
  source 1..78: mol_type = other DNA
gacatccagatgacccagtctccatcctccctgtctgcgtctgtaggagacacagtcaccatcacttgccgggcaagt

SEQ ID NO: 9612 - DNA, 78 bp, synthetic construct
  misc_feature 1..78: note = Synthetic construct
  source 1..78: mol_type = other DNA
gaagtagtgctgacgcagtctccagcctccctgtctctggctccaggggaaagagccaccctctcttgcagggccagt

SEQ ID NO: 9613 - DNA, 78 bp, synthetic construct
  misc_feature 1..78: note = Synthetic construct
  source 1..78: mol_type = other DNA
gatgttgtgatgactcagtctccactctccctgcccgtcacccttggacagccggccttcatctcctgcaggtccagt

SEQ ID NO: 9614 - DNA, 49 bp, synthetic construct
  misc_feature 1..49: note = Synthetic construct
  source 1..49: mol_type = other DNA
ggggtctttgtctccaggggaaagggccaccctctcctgcagggccagt

SEQ ID NO: 9615 - DNA, 75 bp, synthetic construct
  misc_feature 1..75: note = Synthetic construct
  source 1..75: mol_type = other DNA
cagtctgtcctgactcagcctgcctccgtgtctgggtctcctggacagtcgatcaccatctcctgctctggatcc

SEQ ID NO: 9616 - DNA, 75 bp, synthetic construct
  misc_feature 1..75: note = Synthetic construct
  source 1..75: mol_type = other DNA
tcctatgtcctgactcagccaccgtcggtgtcagtggccccaggacagacggccagactttcctgtgggggcgac

SEQ ID NO: 9617 - DNA, 78 bp, synthetic construct
  misc_feature 1..78: note = Synthetic construct
  source 1..78: mol_type = other DNA
gacatcgtgatgacccagtctccagaatttctggctgtgtctctgggcgagagggcctccatcaactgcaagtccagc

SEQ ID NO: 9618 - DNA, 75 bp, synthetic construct
  misc_feature 1..75: note = Synthetic construct
  source 1..75: mol_type = other DNA
tcctatgtactgactcagccaccctcagtgtccgcggccccaggaaagacggccaggattacctgtgggggaaac

SEQ ID NO: 9619 - DNA, 78 bp, synthetic construct
  misc_feature 1..78: note = Synthetic construct
  source 1..78: mol_type = other DNA
gccatccggatgacccagtctccatcctcactctctgcatctacaggagacagagtcaccgtcacttgtcgcgcgagt

SEQ ID NO: 9620 - DNA, 78 bp, synthetic construct
  misc_feature 1..78: note = Synthetic construct
  source 1..78: mol_type = other DNA
gacatccaaatgacccagtctccatcctccctgtctgcatctgtaggagacagagtcaccatcacttgccgggcaagt

SEQ ID NO: 9621 - DNA, 78 bp, synthetic construct
  misc_feature 1..78: note = Synthetic construct
  source 1..78: mol_type = other DNA
gaaatagtgatgacgcagtctccagccaccctgtttgtgtctccagggcaaagagtcaccctctcctgcagggccagt

SEQ ID NO: 9622 - DNA, 75 bp, synthetic construct
  misc_feature 1..75: note = Synthetic construct
  source 1..75: mol_type = other DNA
cagtctgccctgactcagtctgcctccgtgtctgggtctcctggacagtcgatcaccatctcctgcactggaacc

SEQ ID NO: 9623 - DNA, 75 bp, synthetic construct
  misc_feature 1..75: note = Synthetic construct
  source 1..75: mol_type = other DNA
tcctatgagctgactcagccacactcagtgtcagtggccacagcacagatggccaagatcacctgtgggggaaac

SEQ ID NO: 9624 - DNA, 75 bp, synthetic construct
  misc_feature 1..75: note = Synthetic construct
  source 1..75: mol_type = other DNA
tcctatgtgttgactcagccaccctcagtgtcagtggccccaggaaagacggccaggattccctgtgggggacag

SEQ ID NO: 9625 - DNA, 75 bp, synthetic construct
  misc_feature 1..75: note = Synthetic construct
  source 1..75: mol_type = other DNA
cagtctgtgttgacgcagccgccctcagtgtctggggccccagggcagagggtcaccctctcctgcactgggagc

SEQ ID NO: 9626 - DNA, 78 bp, synthetic construct
  misc_feature 1..78: note = Synthetic construct
  source 1..78: mol_type = other DNA
gatattgtgatgacccagactccactctctctgtccgtcacccctggacagccggcctccatctcctgcaagtctagt

SEQ ID NO: 9627 - DNA, 75 bp, synthetic construct
  misc_feature 1..75: note = Synthetic construct
  source 1..75: mol_type = other DNA
cagtctgtgctgactcagccaccctcagcgtctgggacccccgggctgagggtcaccatctcttgttctggaagc

SEQ ID NO: 9628 - DNA, 75 bp, synthetic construct
  misc_feature 1..75: note = Synthetic construct
  source 1..75: mol_type = other DNA
cagtctgccctgactcagcctgcctccgtgtctgggtctcctggacagtcggtcaccatctcctgcactggaacc

SEQ ID NO: 9629 - DNA, 75 bp, synthetic construct
  misc_feature 1..75: note = Synthetic construct
  source 1..75: mol_type = other DNA
cagtctgtgctgactcagccaccctcagcgtctggggcccccgggcagagggtcatcgtttcttgttctggcagc

SEQ ID NO: 9630 - DNA, 78 bp, synthetic construct
  misc_feature 1..78: note = Synthetic construct
  source 1..78: mol_type = other DNA
gacatccagatgacccagtctccatcctccctgtctgcatctgtgggagacagagtcaccatcacctgccggacaagt

SEQ ID NO: 9631 - DNA, 75 bp, synthetic construct
  misc_feature 1..75: note = Synthetic construct
  source 1..75: mol_type = other DNA
tcctttgagttgacacagccaccctcggtgtcagtgtctccaggacagacggccaggatcacctgctctggagat

SEQ ID NO: 9632 - DNA, 75 bp, synthetic construct
  misc_feature 1..75: note = Synthetic construct
  source 1..75: mol_type = other DNA
cagtctgccctgactcagcctgcctccgtgtctgggtctcctgggcagtcgatcaccatttcctgcaatggatcc

SEQ ID NO: 9633 - DNA, 75 bp, synthetic construct
  misc_feature 1..75: note = Synthetic construct
  source 1..75: mol_type = other DNA
tcccatgagctgacacagccaccctcggtgtcagtttccccaggagagacggccaagatcacctgctctggagat

SEQ ID NO: 9634 - DNA, 75 bp, synthetic construct
  misc_feature 1..75: note = Synthetic construct
  source 1..75: mol_type = other DNA
cagtctgtgttgacgcagccgccctcagtgtctgcggccccaggacagaaggtcaccatgtcctgctctggaagg

SEQ ID NO: 9635 - DNA, 78 bp, synthetic construct
  misc_feature 1..78: note = Synthetic construct
  source 1..78: mol_type = other DNA
gacatccagatgacccagtctccatctttcctgtctgcatctgtgggggacagagtcaccatcacttgccgggcaagt

SEQ ID NO: 9636 - DNA, 75 bp, synthetic construct
  misc_feature 1..75: note = Synthetic construct
  source 1..75: mol_type = other DNA
cagtctgccctgactcagcctgcctccgtgtctgggtctcctggacagtcgatcaccctctcctgcactgggacc

SEQ ID NO: 9637 - DNA, 75 bp, synthetic construct; identical to SEQ ID NO: 1846
  misc_feature 1..75: note = Synthetic construct
  source 1..75: mol_type = other DNA

SEQ ID NO: 9638 - DNA, 75 bp, synthetic construct
  misc_feature 1..75: note = Synthetic construct
  source 1..75: mol_type = other DNA
tcctatgttgtgactcagccaccctcggtgtcggtggccccaggacagacggccatgattccctgtggggcatac

SEQ ID NO: 9639 - DNA, 78 bp, synthetic construct
  misc_feature 1..78: note = Synthetic construct
  source 1..78: mol_type = other DNA
gagattgttttgacgcagtctccaggcaccctgtctttgtctccaggggaacgagccaccctctcttgcacggccagt

SEQ ID NO: 9640 - DNA, 78 bp, synthetic construct
  misc_feature 1..78: note = Synthetic construct
  source 1..78: mol_type = other DNA
gacatccagatgacccagtctccctcttccctgtctgcatctgtgggagacagagtcaccatcacttgccgggcgagt

SEQ ID NO: 9641 - DNA, 78 bp, synthetic construct
  misc_feature 1..78: note = Synthetic construct
  source 1..78: mol_type = other DNA
gagattgtgttgactcagtctccaggcaccctgtctttgtctccaggggaaacagccaccctctcctgcagggccagt

SEQ ID NO: 9642 - DNA, 75 bp, synthetic construct
  misc_feature 1..75: note = Synthetic construct
  source 1..75: mol_type = other DNA
tcctctgtgctgactcagccaccctcggtgtcagtgccccccggacagacggccaggattacctgtgggggaagc

SEQ ID NO: 9643 - DNA, 75 bp, synthetic construct
  misc_feature 1..75: note = Synthetic construct
  source 1..75: mol_type = other DNA
cagtctgccctgactcaacctgcctccgtgtctgggtctcctgaacagtcgatcaccatcgcctgcaccggaagc

SEQ ID NO: 9644 - DNA, 75 bp, synthetic construct
  misc_feature 1..75: note = Synthetic construct
  source 1..75: mol_type = other DNA
cagtctgtgctgacgcagccgccctcagtgtctggggccccagggcagaaggtcaccatctcctgcactgggagc

SEQ ID NO: 9645 - DNA, 78 bp, synthetic construct
  misc_feature 1..78: note = Synthetic construct
  source 1..78: mol_type = other DNA
aacgtccagatgacccagtctccttccaccctgtctgcatctgtaggagacagagtcaccatcacttgccgggccagt

SEQ ID NO: 9646 - DNA, 51 bp, synthetic construct
  misc_feature 1..51: note = Synthetic construct
  source 1..51: mol_type = other DNA
ttagcctggtaccagcagaaacctggccaggctcccaggctcctcatctat

SEQ ID NO: 9647 - DNA, 51 bp, synthetic construct
  misc_feature 1..51: note = Synthetic construct
  source 1..51: mol_type = other DNA
ttggcctggtatcagcaaaaaccagggaaagcccctaacctcctcatctat

SEQ ID NO: 9648 - DNA, 51 bp, synthetic construct
  misc_feature 1..51: note = Synthetic construct
  source 1..51: mol_type = other DNA
gtctcctggttccaacatcacccaggcaaagcccccaaactcataatttat

SEQ ID NO: 9649 - DNA, 51 bp, synthetic construct
  misc_feature 1..51: note = Synthetic construct
  source 1..51: mol_type = other DNA
ttagcctggtatcagcagagatcagggaaagcccctaagcttctgctgtat

SEQ ID NO: 9650 - DNA, 51 bp, synthetic construct
  misc_feature 1..51: note = Synthetic construct
  source 1..51: mol_type = other DNA
gtagcctggtaccagcagaaacctggccagcctcccagactcctcatctct

SEQ ID NO: 9651 - DNA, 51 bp, synthetic construct
  misc_feature 1..51: note = Synthetic construct
  source 1..51: mol_type = other DNA
ccctactggttccagcagaagcctggccaagcccccaggacactgatttat

SEQ ID NO: 9652 - DNA, 51 bp, synthetic construct
  misc_feature 1..51: note = Synthetic construct
  source 1..51: mol_type = other DNA
gtcgcctggtaccaacaacaccctgataaagcccccaaggtcataattttt

SEQ ID NO: 9653 - DNA, 51 bp, synthetic construct
  misc_feature 1..51: note = Synthetic construct
  source 1..51: mol_type = other DNA
ttagcctggtatcagcagacacctggccaggctcccaggctccttatatat

SEQ ID NO: 9654 - DNA, 51 bp, synthetic construct
  misc_feature 1..51: note = Synthetic construct
  source 1..51: mol_type = other DNA
ttggcctggtatcagcagaaaccagggaaagccccgaggatcttgatctat

SEQ ID NO: 9655 - DNA, 51 bp, synthetic construct
  misc_feature 1..51: note = Synthetic construct
  source 1..51: mol_type = other DNA
gtctcctggtaccaacagcacccaggcaaagcccccaaactcataatttat

SEQ ID NO: 9656 - DNA, 51 bp, synthetic construct
  misc_feature 1..51: note = Synthetic construct
  source 1..51: mol_type = other DNA
ttatcttggttccagcagaagccaggacagcctcctaagttgctcatttac

SEQ ID NO: 9657 - DNA, 51 bp, synthetic construct
  misc_feature 1..51: note = Synthetic construct
  source 1..51: mol_type = other DNA
gtttattggtaccaacagaagccaggccaggcccctgaattggtgatgttt

SEQ ID NO: 9658 - DNA, 51 bp, synthetic construct
  misc_feature 1..51: note = Synthetic construct
  source 1..51: mol_type = other DNA
ttagcctggtaccaacacaagcctggccaggctcccagactcctcatctat

SEQ ID NO: 9659 - DNA, 51 bp, synthetic construct
  misc_feature 1..51: note = Synthetic construct
  source 1..51: mol_type = other DNA
ttaacttggtaccaacagaagccagggcagcctcctaagaaactcatttcc

SEQ ID NO: 9660 - DNA, 51 bp, synthetic construct
  misc_feature 1..51: note = Synthetic construct
  source 1..51: mol_type = other DNA
ttagcctggtaccagcagaaacctggccaggctcccacgctcctcatttat

SEQ ID NO: 9661 - DNA, 51 bp, synthetic construct
  misc_feature 1..51: note = Synthetic construct
  source 1..51: mol_type = other DNA
gtctcctggtaccaacaaaacccaggcaaagcccccaaactcatgatttat

SEQ ID NO: 9662 - DNA, 51 bp, synthetic construct
  misc_feature 1..51: note = Synthetic construct
  source 1..51: mol_type = other DNA
ttagcttggtaccagcagaaaccaggacagcctcctaaactgctcactaaa

SEQ ID NO: 9663 - DNA, 51 bp, synthetic construct
  misc_feature 1..51: note = Synthetic construct
  source 1..51: mol_type = other DNA
gtacactggtaccagcagcttccaggaacagcccccaaactcctcatctat

SEQ ID NO: 9664 - DNA, 51 bp, synthetic construct
  misc_feature 1..51: note = Synthetic construct
  source 1..51: mol_type = other DNA
gtctcctggtaccaacaacacccaggcaaagcccccaaactcatgatttct

SEQ ID NO: 9665 - DNA, 51 bp, synthetic construct
  misc_feature 1..51: note = Synthetic construct
  source 1..51: mol_type = other DNA
ttagcttggtaccagcagaaaccagggcagcctcctaagttgctcatttac

SEQ ID NO: 9666 - DNA, 51 bp, synthetic construct
  misc_feature 1..51: note = Synthetic construct
  source 1..51: mol_type = other DNA
tcaagctggttccagcagaagccaggacaggcccctgttcttgtcatcttt

SEQ ID NO: 9667 - DNA, 51 bp, synthetic construct
  misc_feature 1..51: note = Synthetic construct
  source 1..51: mol_type = other DNA
gtgcagtggtaccagcagcgcccgggcagtgcccccaccactgtgatctat

SEQ ID NO: 9668 - DNA, 51 bp, synthetic construct
  misc_feature 1..51: note = Synthetic construct
  source 1..51: mol_type = other DNA
ctagcttggtaccagcagaagccaagacagcctcctaagttactcatcacc

SEQ ID NO: 9669 - DNA, 51 bp, synthetic construct
  misc_feature 1..51: note = Synthetic construct
  source 1..51: mol_type = other DNA
ttacactggtaccagcacaaaccagatcagtctccaaaactgctcatcaag

SEQ ID NO: 9670 - DNA, 51 bp, synthetic construct
  misc_feature 1..51: note = Synthetic construct
  source 1..51: mol_type = other DNA
ttagcctggtaccagcagaaacctggccaggctcccacgctcctcatctac

SEQ ID NO: 9671 - DNA, 51 bp, synthetic construct
  misc_feature 1..51: note = Synthetic construct
  source 1..51: mol_type = other DNA
ttagcctggtaccagcagaaacctggccagcctcccaggctcctcatctat

SEQ ID NO: 9672 - DNA, 51 bp, synthetic construct
  misc_feature 1..51: note = Synthetic construct
  source 1..51: mol_type = other DNA
ttaagttggtatcagcagaaacgtggccaggctcccaggctcgtcatctat

SEQ ID NO: 9673 - DNA, 51 bp, synthetic construct
  misc_feature 1..51: note = Synthetic construct
  source 1..51: mol_type = other DNA
gtccactggtaccagcagaggccaggccaggcccctagactggtcgtcaaa

SEQ ID NO: 9674 - DNA, 51 bp, synthetic construct
  misc_feature 1..51: note = Synthetic construct
  source 1..51: mol_type = other DNA
gtcaactggtaccagcagctcccaggagcggcccccaagctcctcatctat

SEQ ID NO: 9675 - DNA, 51 bp, synthetic construct
  misc_feature 1..51: note = Synthetic construct
  source 1..51: mol_type = other DNA
ttaaattggtatcagcaaaaaccaggaaaagcccccttgctcctgatctat

SEQ ID NO: 9676 - DNA, 51 bp, synthetic construct
  misc_feature 1..51: note = Synthetic construct
  source 1..51: mol_type = other DNA
gtctcccgctaccagcagcacccaggcaaagcccccaaagtcatgatttat

SEQ ID NO: 9677 - DNA, 51 bp, synthetic construct
  misc_feature 1..51: note = Synthetic construct
  source 1..51: mol_type = other DNA
ttctattggtacctgcagaagccaggccagtctccacagctcctaatctat

SEQ ID NO: 9678 - DNA, 51 bp, synthetic construct
  misc_feature 1..51: note = Synthetic construct
  source 1..51: mol_type = other DNA
ttagcctggtatcagcaaaaaccagggaaagcccctaagctcctgatctat

SEQ ID NO: 9679 - DNA, 51 bp, synthetic construct
  misc_feature 1..51: note = Synthetic construct
  source 1..51: mol_type = other DNA
gcttattggtaccaacagaagccaggccaggcccctgtattggtgatatat

SEQ ID NO: 9680 - DNA, 51 bp, synthetic construct
  misc_feature 1..51: note = Synthetic construct
  source 1..51: mol_type = other DNA
gtatactggtaccagcagctcccaggaacggcccccaaactcctcatctat

SEQ ID NO: 9681 - DNA, 51 bp, synthetic construct
  misc_feature 1..51: note = Synthetic construct
  source 1..51: mol_type = other DNA
ttggcctggtatcagcagaaacctgggaaagcccctaaactcctgatctat

SEQ ID NO: 9682 - DNA, 51 bp, synthetic construct
  misc_feature 1..51: note = Synthetic construct
  source 1..51: mol_type = other DNA
gtctcctggttccaacaacacccaggcaaagcccccaaactcattatttat

SEQ ID NO: 9683 - DNA, 51 bp, synthetic construct
  misc_feature 1..51: note = Synthetic construct
  source 1..51: mol_type = other DNA
ttagcctggtatcagcaaaaaccagggaaagcccctaaggtcctgatccat

SEQ ID NO: 9684 - DNA, 51 bp, synthetic construct
  misc_feature 1..51: note = Synthetic construct
  source 1..51: mol_type = other DNA
gtggactggtaccagcagagaccagggaagggcccccggtttgtgatgcga

SEQ ID NO: 9685 - DNA, 51 bp, synthetic construct
  misc_feature 1..51: note = Synthetic construct
  source 1..51: mol_type = other DNA
ttagcctggtatcagcaaaaaccagggaaagcccctaaactcctgatctac

SEQ ID NO: 9686 - DNA, 51 bp, synthetic construct
  misc_feature 1..51: note = Synthetic construct
  source 1..51: mol_type = other DNA
ttagcttggtaccagcagaaaccaggacagcctcctaagctgctcatttac

SEQ ID NO: 9687 - DNA, 51 bp, synthetic construct
  misc_feature 1..51: note = Synthetic construct
  source 1..51: mol_type = other DNA
ttgaattggtttcagcagaggccaggccaatctccaaggcgcctaatttat

SEQ ID NO: 9688 - DNA, 51 bp, synthetic construct; identical to SEQ ID NO: 1850
  misc_feature 1..51: note = Synthetic construct
  source 1..51: mol_type = other DNA

SEQ ID NO: 9689 - DNA, 51 bp, synthetic construct
  misc_feature 1..51: note = Synthetic construct
  source 1..51: mol_type = other DNA
gtctcctggtaccaacaacacccgggcaaagcccccaaggtcctgatttat

SEQ ID NO: 9690 - DNA, 51 bp, synthetic construct
  misc_feature 1..51: note = Synthetic construct
  source 1..51: mol_type = other DNA
gtacactggttccagcagcttccagggacagcccccaaactcctcatttat

SEQ ID NO: 9691 - DNA, 51 bp, synthetic construct
  misc_feature 1..51: note = Synthetic construct
  source 1..51: mol_type = other DNA
gtctcctggtaccaacaacacccaggcaaagcccccaaactcatgatttat

SEQ ID NO: 9692 - DNA, 51 bp, synthetic construct
  misc_feature 1..51: note = Synthetic construct
  source 1..51: mol_type = other DNA
gtgcactggtaccagcagaagccaggccaggcccctgtgctggtcgtctat

SEQ ID NO: 9693 - DNA, 51 bp, synthetic construct
  misc_feature 1..51: note = Synthetic construct
  source 1..51: mol_type = other DNA
ttaaactggtaccaacaaaaacctggccaggctcccaggctcctcatctat

SEQ ID NO: 9694 - DNA, 51 bp, synthetic construct
  misc_feature 1..51: note = Synthetic construct
  source 1..51: mol_type = other DNA
ttagcctggtaccagcagaaacctggacaggctcccaggctcctcatctat

SEQ ID NO: 9695 - DNA, 51 bp, synthetic construct
  misc_feature 1..51: note = Synthetic construct
  source 1..51: mol_type = other DNA
gtcgcttggcttcagcagcggccagggaagggccctcgattcttgatgacg

SEQ ID NO: 9696 - DNA, 51 bp, synthetic construct
  misc_feature 1..51: note = Synthetic construct
  source 1..51: mol_type = other DNA
gtacactggtaccagcaacttccaggaacagcccccaaactcctcatctat

SEQ ID NO: 9697 - DNA, 51 bp, synthetic construct
  misc_feature 1..51: note = Synthetic construct
  source 1..51: mol_type = other DNA
ttagcctggtatcagcagaaacatggccaggctcccaggctcctcatctat

SEQ ID NO: 9698 - DNA, 51 bp, synthetic construct
  misc_feature 1..51: note = Synthetic construct
  source 1..51: mol_type = other DNA
ttagtctggtaccaacagaaacctggccaggctcccaggctcctcatctat

SEQ ID NO: 9699 - DNA, 51 bp, synthetic construct
  misc_feature 1..51: note = Synthetic construct
  source 1..51: mol_type = other DNA
ctagcctggtaccaacaaaagcctggccaggctcccaggctcctcatcttt

SEQ ID NO: 9700 - DNA, 51 bp, synthetic construct
  misc_feature 1..51: note = Synthetic construct
  source 1..51: mol_type = other DNA
ctgagttggtttcaccagaggccaggccgagctccagggcgcctaatttat

SEQ ID NO: 9701 - DNA, 51 bp, synthetic construct
  misc_feature 1..51: note = Synthetic construct
  source 1..51: mol_type = other DNA
gtctcctggtaccaaaaccacccaggcaaagcccccaaagtcttgatttat

SEQ ID NO: 9702 - DNA, 51 bp, synthetic construct
  misc_feature 1..51: note = Synthetic construct
  source 1..51: mol_type = other DNA
ttagcttggtaccagcagaagccagggcggccacctaagttactcatttac

SEQ ID NO: 9703 - DNA, 51 bp, synthetic construct
  misc_feature 1..51: note = Synthetic construct
  source 1..51: mol_type = other DNA
ttagcctggtaccaacagaaacctggccaggctcccaggctcctcatctat

SEQ ID NO: 9704 - DNA, 51 bp, synthetic construct
  misc_feature 1..51: note = Synthetic construct
  source 1..51: mol_type = other DNA
ttaggctggtatcagcagaaaccagggaaagcccctaagcgcctgatctat

SEQ ID NO: 9705 - DNA, 51 bp, synthetic construct
  misc_feature 1..51: note = Synthetic construct
  source 1..51: mol_type = other DNA
gtgaattggtatcaacagaaacctggccagcctcccaggctcctcatctat

SEQ ID NO: 9706 - DNA, 51 bp, synthetic construct
  misc_feature 1..51: note = Synthetic construct
  source 1..51: mol_type = other DNA
ttgaattggtttcagcagaggccaggccaatctccaaggcgccttatttat

SEQ ID NO: 9707 - DNA, 51 bp, synthetic construct
  misc_feature 1..51: note = Synthetic construct
  source 1..51: mol_type = other DNA
ttaaattggtatcagcacaaaccagggaaaccccctaccctcctgatctac

SEQ ID NO: 9708 - DNA, 51 bp, synthetic construct
  misc_feature 1..51: note = Synthetic construct
  source 1..51: mol_type = other DNA
ttaagttggtatcagcagagaccagggaaagcccctaagctcctgatctcc

SEQ ID NO: 9709 - DNA, 51 bp, synthetic construct
  misc_feature 1..51: note = Synthetic construct
  source 1..51: mol_type = other DNA
ctagcctggtatcagcagagaccagggaaagcccctaaactcctgctctat

SEQ ID NO: 9710 - DNA, 51 bp, synthetic construct
  misc_feature 1..51: note = Synthetic construct
  source 1..51: mol_type = other DNA
ttaggctggtaccaacaaaaacctggccaggctcccagtctcctcatctat

SEQ ID NO: 9711 - DNA, 51 bp, synthetic construct
  misc_feature 1..51: note = Synthetic construct
  source 1..51: mol_type = other DNA
ttaaattggtatcagcagaaaccagggaaagcccctaaactcctgatctat

SEQ ID NO: 9712 - DNA, 51 bp, synthetic construct
  misc_feature 1..51: note = Synthetic construct
  source 1..51: mol_type = other DNA
ttaagttggtatcagaagaaaccagggacagcccctaagctcctgatctat

SEQ ID NO: 9713 - DNA, 51 bp, synthetic construct
  misc_feature 1..51: note = Synthetic construct
  source 1..51: mol_type = other DNA
ttaaattggtatcagcagaaaccagggaaagcccctaagctcctgatctat

SEQ ID NO: 9714 - DNA, 51 bp, synthetic construct
  misc_feature 1..51: note = Synthetic construct
  source 1..51: mol_type = other DNA
ttacattggtatcagcagaaaccagggagcgcccctaaactcctgatctat

SEQ ID NO: 9715 - DNA, 51 bp, synthetic construct
  misc_feature 1..51: note = Synthetic construct
  source 1..51: mol_type = other DNA
ttaaattggtatcaacagaagccaggggaagcccctaacgtcctgatctac

SEQ ID NO: 9716 - DNA, 51 bp, synthetic construct
  misc_feature 1..51: note = Synthetic construct
  source 1..51: mol_type = other DNA
ttatcctggtaccaacaaaaacctggccaggctcccagactcctcatctat

SEQ ID NO: 9717 - DNA, 51 bp, synthetic construct
  misc_feature 1..51: note = Synthetic construct
  source 1..51: mol_type = other DNA
ttagcctggtaccagcagaagcttggccaggctcccaggctcctcttcttt

SEQ ID NO: 9718 - DNA, 51 bp, synthetic construct
  misc_feature 1..51: note = Synthetic construct
  source 1..51: mol_type = other DNA
ctgaactggtatcagcagaagcccggagaggcccctaaactgctgatctac

SEQ ID NO: 9719 - DNA, 51 bp, synthetic construct
  misc_feature 1..51: note = Synthetic construct
  source 1..51: mol_type = other DNA
ttggcctggtatcagcagaaaccagggaaagcccctaaactcctgatttat

SEQ ID NO: 9720 - DNA, 51 bp, synthetic construct
  misc_feature 1..51: note = Synthetic construct
  source 1..51: mol_type = other DNA
atagcctggtaccaacaaaaacctggccaggctcccaggctcctcatctat

SEQ ID NO: 9721 - DNA, 51 bp, synthetic construct
  misc_feature 1..51: note = Synthetic construct
  source 1..51: mol_type = other DNA
ttagcctggtaccagcagaaacctggccaggctcccaagctcctcatctct

SEQ ID NO: 9722 - DNA, 51 bp, synthetic construct
  misc_feature 1..51: note = Synthetic construct
  source 1..51: mol_type = other DNA
ttagcctggtaccagcagaaacctggccaggctcccaggctcctcatctct

SEQ ID NO: 9723 - DNA, 51 bp, synthetic construct
  misc_feature 1..51: note = Synthetic construct
  source 1..51: mol_type = other DNA
ttggcctggtatcagcagaaaccagggaaagcccctaagctcctgatctat

SEQ ID NO: 9724 - DNA, 51 bp, synthetic construct
  misc_feature 1..51: note = Synthetic construct
  source 1..51: mol_type = other DNA
ttagcctggtaccagcagaaacctggccaggctcccaggctcgtcatccat

SEQ ID NO: 9725 - DNA, 51 bp, synthetic construct
  misc_feature 1..51: note = Synthetic construct
  source 1..51: mol_type = other DNA
ctagcttggtaccagcagaaatcaggacagcctcctaagctgctcctttac

SEQ ID NO: 9726 - DNA, 51 bp, synthetic construct
  misc_feature 1..51: note = Synthetic construct
  source 1..51: mol_type = other DNA
ctagcttggtaccagcagagaccacgacagtctcctagactgctcatttac

SEQ ID NO: 9727 - DNA, 51 bp, synthetic construct
  misc_feature 1..51: note = Synthetic construct
  source 1..51: mol_type = other DNA
ttagcctggtatcagcaaaaaccagggaaagcccctgagctcctgatctat

SEQ ID NO: 9728 - DNA, 51 bp, synthetic construct
  misc_feature 1..51: note = Synthetic construct
  source 1..51: mol_type = other DNA
ttagcttggtaccagcacaaaccaggacagcctcctaagctgctcgtttac

SEQ ID NO: 9729 - DNA, 51 bp, synthetic construct
  misc_feature 1..51: note = Synthetic construct
  source 1..51: mol_type = other DNA
ttagcttggtttcagcagaaaccaggccagcctcctaagctgctcatttcc

SEQ ID NO: 9730 - DNA, 51 bp, synthetic construct
  misc_feature 1..51: note = Synthetic construct
  source 1..51: mol_type = other DNA
acttattggtaccagcagaagccaggccaggcccctgtgctgatgatatat

SEQ ID NO: 9731 - DNA, 51 bp, synthetic construct
  misc_feature 1..51: note = Synthetic construct
  source 1..51: mol_type = other DNA
gcaagttggtaccaacagaaaccaagacaggcccctctacttgtcatctat

SEQ ID NO: 9732 - DNA, 51 bp, synthetic construct
  misc_feature 1..51: note = Synthetic construct
  source 1..51: mol_type = other DNA
gcttattggtaccagcagaagccaggccaggcccctgtgatgatgatatat

SEQ ID NO: 9733 - DNA, 51 bp, synthetic construct
  misc_feature 1..51: note = Synthetic construct
  source 1..51: mol_type = other DNA
gtgcactggtaccagcagaagccaggccaggcccctctggtggtcgtctat

SEQ ID NO: 9734 - DNA, 51 bp, synthetic construct
  misc_feature 1..51: note = Synthetic construct
  source 1..51: mol_type = other DNA
gtctcctggtaccaacaaaatccagacaaagcccccaaactcatgatttat

SEQ ID NO: 9735 - DNA, 50 bp, synthetic construct
  misc_feature 1..50: note = Synthetic construct
  source 1..50: mol_type = other DNA
gtctcctggtaccaacaaaacccagccaagcccccaaactcatgatttat

SEQ ID NO: 9736 - DNA, 51 bp, synthetic construct
  misc_feature 1..51: note = Synthetic construct
  source 1..51: mol_type = other DNA
gtctcctggtaccaacaaaacccaggcaaagcccccaaactcatgatttct

SEQ ID NO: 9737 - DNA, 51 bp, synthetic construct
  misc_feature 1..51: note = Synthetic construct
  source 1..51: mol_type = other DNA
gtctcctggtaccaacaaaacccaggcaaagcccccaaactcatggtttct

SEQ ID NO: 9738 - DNA, 50 bp, synthetic construct
  misc_feature 1..50: note = Synthetic construct
  source 1..50: mol_type = other DNA
gtctcctggtaccaacaaaacccaggcaaagcccccaaattatgatttat

SEQ ID NO: 9739 - DNA, 50 bp, synthetic construct
  misc_feature 1..50: note = Synthetic construct
  source 1..50: mol_type = other DNA
gtctcctggtaccaacaaaacccagccaagcccccaaactcattatttat

SEQ ID NO: 9740 - DNA, 51 bp, synthetic construct
  misc_feature 1..51: note = Synthetic construct
  source 1..51: mol_type = other DNA
ttaaattggtttcagcaaaaaccagggcaagcccctaagctcctgatctac

SEQ ID NO: 9741 - DNA, 51 bp, synthetic construct
  misc_feature 1..51: note = Synthetic construct
  source 1..51: mol_type = other DNA
ttagcctggtaccagcagaaacccggccaggctcccaggctcctcatctat

SEQ ID NO: 9742 - DNA, 51 bp, synthetic construct
  misc_feature 1..51: note = Synthetic construct
  source 1..51: mol_type = other DNA
ttggcttggtaccagcagaaaccaggacagtctcctaaactgctcatttcc

SEQ ID NO: 9743 - DNA, 51 bp, synthetic construct
  misc_feature 1..51: note = Synthetic construct
  source 1..51: mol_type = other DNA
ttggcctggtaccagcagaaacctggccaggctcccaggctcctcatctac

SEQ ID NO: 9744 - DNA, 51 bp, synthetic construct
  misc_feature 1..51: note = Synthetic construct
  source 1..51: mol_type = other DNA
ttagcctggtatcaggaaaaacctggccaggttcccaggctcctcatctat

SEQ ID NO: 9745 - DNA, 51 bp, synthetic construct
  misc_feature 1..51: note = Synthetic construct
  source 1..51: mol_type = other DNA
gcaagctggtaccagcagaagccaggacaggcccctgtacttgtcatctat

SEQ ID NO: 9746 - DNA, 51 bp, synthetic construct
  misc_feature 1..51: note = Synthetic construct
  source 1..51: mol_type = other DNA
gtgcactggtaccagcagaagccaggccaggtccctgtgctggtcgtctat

SEQ ID NO: 9747 - DNA, 51 bp, synthetic construct
  misc_feature 1..51: note = Synthetic construct
  source 1..51: mol_type = other DNA
ttagcctggcaccagcagaaacctggccaggctcccaggctcctcatctat

SEQ ID NO: 9748 - DNA, 51 bp, synthetic construct
  misc_feature 1..51: note = Synthetic construct
  source 1..51: mol_type = other DNA
gtgtattggtatcagcagttcccaggaaaggccccccaactcctcatcttt

SEQ ID NO: 9749 - DNA, 51 bp, synthetic construct
  misc_feature 1..51: note = Synthetic construct
  source 1..51: mol_type = other DNA
ttagcctggtatcaacagaaacgtggccaggctcccaggctcctcatctat

SEQ ID NO: 9750 - DNA, 51 bp, synthetic construct
  misc_feature 1..51: note = Synthetic construct
  source 1..51: mol_type = other DNA
ttggactggtacctgcagaagccagggcagtctccacagctcctgatctat

SEQ ID NO: 9751 - DNA, 51 bp, synthetic construct
  misc_feature 1..51: note = Synthetic construct
  source 1..51: mol_type = other DNA
gtctcctggtaccaacagcacccaggcaaagcccccaaactcatgatttat

SEQ ID NO: 9752 - DNA, 51 bp, synthetic construct
  misc_feature 1..51: note = Synthetic construct
  source 1..51: mol_type = other DNA
ttaggctggtatcagcagaaaccagggcaggcccctaagttcctgatctct

SEQ ID NO: 9753 - DNA, 51 bp, synthetic construct
  misc_feature 1..51: note = Synthetic construct
  source 1..51: mol_type = other DNA
gtctattggtaccagcagaagccgggccgggcccctatcttggtaatctat

SEQ ID NO: 9754 - DNA, 51 bp, synthetic construct
  misc_feature 1..51: note = Synthetic construct
  source 1..51: mol_type = other DNA
ttagcctggtatcagcagaaaccagggaaagcccctaaggtcctactctat

SEQ ID NO: 9755 - DNA, 51 bp, synthetic construct
  misc_feature 1..51: note = Synthetic construct
  source 1..51: mol_type = other DNA
ttagcctggtatcagcagaaaccagggaatccccctaagcgcctgatcttt

SEQ ID NO: 9756 - DNA, 51 bp, synthetic construct
  misc_feature 1..51: note = Synthetic construct
  source 1..51: mol_type = other DNA
ttggcctggtatcagcagaaaccagggaaagcccctaaactcctcatctat

SEQ ID NO: 9757 - DNA, 51 bp, synthetic construct
  misc_feature 1..51: note = Synthetic construct
  source 1..51: mol_type = other DNA
gtacactggtaccagcagcttccagggacagcccccaaactcctcatcttt

SEQ ID NO: 9758 - DNA, 51 bp, synthetic construct
  misc_feature 1..51: note = Synthetic construct
  source 1..51: mol_type = other DNA
ttagcttggtaccagcagaaaccaggacagcctcctaatttgctcatttac

SEQ ID NO: 9759 - DNA, 51 bp, synthetic construct
  misc_feature 1..51: note = Synthetic construct
  source 1..51: mol_type = other DNA
ttagcctggtaccagcagaagtctggccaggctcccaggctcctcatctat

SEQ ID NO: 9760 - DNA, 32 bp, synthetic construct
  misc_feature 1..32: note = Synthetic construct
  source 1..32: mol_type = other DNA
acccaggcaaagcccccaaagtcttgatttat

SEQ ID NO: 9761 - DNA, 51 bp, synthetic construct
  misc_feature 1..51: note = Synthetic construct
  source 1..51: mol_type = other DNA
ttggcctggtatcagcaaaaaccagggaaagcccctaacctcctgatctat

SEQ ID NO: 9762 - DNA, 51 bp, synthetic construct
  misc_feature 1..51: note = Synthetic construct
  source 1..51: mol_type = other DNA
tctcggtggttccagcagaagccaggccaggcccctgtgctggtgatttat

SEQ ID NO: 9763 - DNA, 51 bp, synthetic construct
  misc_feature 1..51: note = Synthetic construct
  source 1..51: mol_type = other DNA
gtacactggtaccaacagaagccaggccaggcccctgtcgtgctcctctat

SEQ ID NO: 9764 - DNA, 51 bp, synthetic construct
  misc_feature 1..51: note = Synthetic construct
  source 1..51: mol_type = other DNA
ttagcctggtacatcctgaaacctggccagactcccaggctcctcatcttt

SEQ ID NO: 9765 - DNA, 51 bp, synthetic construct
  misc_feature 1..51: note = Synthetic construct
  source 1..51: mol_type = other DNA
ttggcctggtaccagcagaaacttggccagcctcccaggctcctcatcttt

SEQ ID NO: 9766 - DNA, 51 bp, synthetic construct
  misc_feature 1..51: note = Synthetic construct
  source 1..51: mol_type = other DNA
ttagcctggtatcagcagaaaccagggcagggtcctgaactcctcatctat

SEQ ID NO: 9767 - DNA, 51 bp, synthetic construct
  misc_feature 1..51: note = Synthetic construct
  source 1..51: mol_type = other DNA
ttagcctggtaccagcagaaacctggccaggctcccaggcttctcatttat

SEQ ID NO: 9768 - DNA, 51 bp, synthetic construct
  misc_feature 1..51: note = Synthetic construct
  source 1..51: mol_type = other DNA
ttggcctggtatcagcacaagccagggaaagcccctaggctcatgatctat

SEQ ID NO: 9769 - DNA, 51 bp, synthetic construct
  misc_feature 1..51: note = Synthetic construct
  source 1..51: mol_type = other DNA
gtaaactggtaccagcagctcccaggaacgccccccaaactcctcatgttt

SEQ ID NO: 9770 - DNA, 51 bp, synthetic construct
  misc_feature 1..51: note = Synthetic construct
  source 1..51: mol_type = other DNA
gctcggtggttccagcaaaagccaggccaggcccctgtattggtgatttct

SEQ ID NO: 9771 - DNA, 51 bp, synthetic construct
  misc_feature 1..51: note = Synthetic construct
  source 1..51: mol_type = other DNA
gcttattggtaccagcggaagccaggccaggcccctcgactggtgatctat

SEQ ID NO: 9772 - DNA, 51 bp, synthetic construct
  misc_feature 1..51: note = Synthetic construct
  source 1..51: mol_type = other DNA
ttggcctggtatcagcagaaagcagggcaagcccctaagctcctgatctat

SEQ ID NO: 9773 - DNA, 51 bp, synthetic construct
  misc_feature 1..51: note = Synthetic construct
  source 1..51: mol_type = other DNA
gtaaactggtaccaacaacttccaggagaagtccccaaactcctcatttat

SEQ ID NO: 9774 - DNA, 51 bp, synthetic construct
  misc_feature 1..51: note = Synthetic construct
  source 1..51: mol_type = other DNA
ttagattggtacctggtgaagcctggacagcctccacaactcctcatttac

SEQ ID NO: 9775 - DNA, 51 bp, synthetic construct
  misc_feature 1..51: note = Synthetic construct
  source 1..51: mol_type = other DNA
ttggcctggtaccaacagaaacctggccagcctcccaggctcctcatctat

SEQ ID NO: 9776 - DNA, 51 bp, synthetic construct
  misc_feature 1..51: note = Synthetic construct
  source 1..51: mol_type = other DNA
ttggcctggtatcagcagaaaccagggaaagcccctaaactcctgatctat

SEQ ID NO: 9777 - DNA, 51 bp, synthetic construct
  misc_feature 1..51: note = Synthetic construct
  source 1..51: mol_type = other DNA
ttggcctggtatcagcagagaccagggaaagcccctaagctcctgatctat

SEQ ID NO: 9778 - DNA, 51 bp, synthetic construct
  misc_feature 1..51: note = Synthetic construct
  source 1..51: mol_type = other DNA
gcttcctggtatcaacagaagccaggccagtcccctgttctggtcatctat

SEQ ID NO: 9779 - DNA, 51 bp, synthetic construct
  misc_feature 1..51: note = Synthetic construct
  source 1..51: mol_type = other DNA
ttagcctggtaccagcagaaacctggccaggctcccaggctcctcatttat

SEQ ID NO: 9780 - DNA, 51 bp, synthetic construct
  misc_feature 1..51: note = Synthetic construct
  source 1..51: mol_type = other DNA
ttagcctggtaccaccacaaacctggccaggctcccaggctcctcatctat

SEQ ID NO: 9781 - DNA, 51 bp, synthetic construct
  misc_feature 1..51: note = Synthetic construct
  source 1..51: mol_type = other DNA
gtcgcttggtaccagcacaaaacagggcagcctcctaagttgctcatttac

SEQ ID NO: 9782 - DNA, 51 bp, synthetic construct
  misc_feature 1..51: note = Synthetic construct
  source 1..51: mol_type = other DNA
ttgagttggtttcaccagaggccaggccagtctccacggcgcctcatttat

SEQ ID NO: 9783 - DNA, 51 bp, synthetic construct
  misc_feature 1..51: note = Synthetic construct
  source 1..51: mol_type = other DNA
ttagcctggtaccagcaaaaacctggccaggctcccaggctcctcatccac

SEQ ID NO: 9784 - DNA, 51 bp, synthetic construct
  misc_feature 1..51: note = Synthetic construct
  source 1..51: mol_type = other DNA
gttctgtggtatcaacaattcccaggagtggcccccaaactcctcatctac

SEQ ID NO: 9785 - DNA, 51 bp, synthetic construct
  misc_feature 1..51: note = Synthetic construct
  source 1..51: mol_type = other DNA
ttaaattggtatcaacaaaaagcagggaaagcccctaagctcctgatctct

SEQ ID NO: 9786 - DNA, 51 bp, synthetic construct
  misc_feature 1..51: note = Synthetic construct
  source 1..51: mol_type = other DNA
cccagctggtaccagcagaccccaggccaggctccacgcacgctcatctac

SEQ ID NO: 9787 - DNA, 51 bp, synthetic construct
  misc_feature 1..51: note = Synthetic construct
  source 1..51: mol_type = other DNA
ttggcctggtatcagcagaaaccagggaaagcccctaacctcctaatttat

SEQ ID NO: 9788 - DNA, 51 bp, synthetic construct
  misc_feature 1..51: note = Synthetic construct
  source 1..51: mol_type = other DNA
ttagcctggtaccagcagagacctggccaggctcccaggctcctcatctat

SEQ ID NO: 9789 - DNA, 51 bp, synthetic construct
  misc_feature 1..51: note = Synthetic construct
  source 1..51: mol_type = other DNA
ttacactggtaccagcagaaaccagatcagtctccaaagctcctcatcaag

SEQ ID NO: 9790 - DNA, 51 bp, synthetic construct
  misc_feature 1..51: note = Synthetic construct
  source 1..51: mol_type = other DNA
ttagcctggtatcaacaaaaacctggccaggctcccaggctcctcatctct

SEQ ID NO: 9791 - DNA, 51 bp, synthetic construct
  misc_feature 1..51: note = Synthetic construct
  source 1..51: mol_type = other DNA
ttaggctggtatcagcagaaaccagggaaagcccctaagctcctgatctat

SEQ ID NO: 9792 - DNA, 51 bp, synthetic construct
  misc_feature 1..51: note = Synthetic construct
  source 1..51: mol_type = other DNA
ttgagttggcttcagcagaggccaggccagcctccaagactcctaatttat

SEQ ID NO: 9793 - DNA, 51 bp, synthetic construct
  misc_feature 1..51: note = Synthetic construct
  source 1..51: mol_type = other DNA
gcttattggtaccagcagaagccaggccaggcccctgtgctggtgatatat

SEQ ID NO: 9794 - DNA, 51 bp, synthetic construct
  misc_feature 1..51: note = Synthetic construct
  source 1..51: mol_type = other DNA
ttaggctggtatcagcagaaaccagggaaagcccctaggctcctgatctat

SEQ ID NO: 9795 - DNA, 51 bp, synthetic construct
  misc_feature 1..51: note = Synthetic construct
  source 1..51: mol_type = other DNA
gtgcagtggttccaactgcgcccgggcagtgtccccaccactgtgatctat

SEQ ID NO: 9796 - DNA, 51 bp, synthetic construct
  misc_feature 1..51: note = Synthetic construct
  source 1..51: mol_type = other DNA
ttagcctggtaccagcacaaacctggccaggctcccaggctcctcatctat

SEQ ID NO: 9797 - DNA, 51 bp, synthetic construct
  misc_feature 1..51: note = Synthetic construct
  source 1..51: mol_type = other DNA
ttgcactggtaccagcagaagccaggccaggcccctgttttggtcgtctat

SEQ ID NO: 9798 - DNA, 51 bp, synthetic construct
  misc_feature 1..51: note = Synthetic construct
  source 1..51: mol_type = other DNA
gtctcctggtaccaacaccacccaggcaaagcccccaaactcatgatttat

SEQ ID NO: 9799 - DNA, 51 bp, synthetic construct
  misc_feature 1..51: note = Synthetic construct
  source 1..51: mol_type = other DNA
ttaaattggtatcagctcagaccgggggaagcccctaacctcctgatccat

SEQ ID NO: 9800 - DNA, 51 bp, synthetic construct
  misc_feature 1..51: note = Synthetic construct
  source 1..51: mol_type = other DNA
ttagcctggtaccagcagagacatggccaggctcccaggctcctcatctat

SEQ ID NO: 9801 - DNA, 51 bp, synthetic construct
  misc_feature 1..51: note = Synthetic construct
  source 1..51: mol_type = other DNA
ttaggctggtatcagcaaaaaccagggaatgcccctaagcgcctgatctac

SEQ ID NO: 9802 - DNA, 51 bp, synthetic construct
  misc_feature 1..51: note = Synthetic construct
  source 1..51: mol_type = other DNA
ttggcttggtacctgcagaggccagggcagtctccacagctcctaatctac

SEQ ID NO: 9803 - DNA, 51 bp, synthetic construct
  misc_feature 1..51: note = Synthetic construct
  source 1..51: mol_type = other DNA
ttaaattggtatcagcagaaaccagggaaagcccctaagttcctgatctat

SEQ ID NO: 9804 - DNA, 51 bp, synthetic construct
  misc_feature 1..51: note = Synthetic construct
  source 1..51: mol_type = other DNA
aaaacctggctccaacagaggcctggacaggcccctcgacttgtcctctac

SEQ ID NO: 9805 - DNA, 51 bp, synthetic construct
  misc_feature 1..51: note = Synthetic construct
  source 1..51: mol_type = other DNA
ttagcctggtaccagcagaaacctggccagggtcccaggctcctcatctat

SEQ ID NO: 9806 - DNA, 51 bp, synthetic construct
  misc_feature 1..51: note = Synthetic construct
  source 1..51: mol_type = other DNA
ttagcctggtatcagcagaaaccaggcaaagttcctaagctcctgatctat

SEQ ID NO: 9807 - DNA, 51 bp, synthetic construct
  misc_feature 1..51: note = Synthetic construct
  source 1..51: mol_type = other DNA
ttagtctggtatcaacagaaacctgggaaagttcctaagctcctgatttat

SEQ ID NO: 9808 - DNA, 51 bp, synthetic construct
  misc_feature 1..51: note = Synthetic construct
  source 1..51: mol_type = other DNA
gcaagttggtaccagcagaagccaggacaggcccctgtgtttgtcatctat

SEQ ID NO: 9809 - DNA, 51 bp, synthetic construct
  misc_feature 1..51: note = Synthetic construct
  source 1..51: mol_type = other DNA
gtgaactggtaccagcacctcccaggaacggcccccaaactcctcatcttt

SEQ ID NO: 9810 - DNA, 51 bp, synthetic construct
  misc_feature 1..51: note = Synthetic construct
  source 1..51: mol_type = other DNA
gtccactggtaccagcagaagccaggccaggcccctgtgctcgtcgtcttt

SEQ ID NO: 9811 - DNA, 51 bp, synthetic construct
  misc_feature 1..51: note = Synthetic construct
  source 1..51: mol_type = other DNA
gtaaactggtatcagcaagtcccaggatcggcccccaaagtcctcatgtat

SEQ ID NO: 9812 - DNA, 51 bp, synthetic construct
  misc_feature 1..51: note = Synthetic construct
  source 1..51: mol_type = other DNA
ttagcctggtatcagcagacaccagggaaagttccaaagctcctgatctac

SEQ ID NO: 9813 - DNA, 51 bp, synthetic construct
  misc_feature 1..51: note = Synthetic construct
  source 1..51: mol_type = other DNA
ttggcctggtatcagcagaaaccagggaaagcccctaacctcctcatctat

SEQ ID NO: 9814 - DNA, 51 bp, synthetic construct
  misc_feature 1..51: note = Synthetic construct
  source 1..51: mol_type = other DNA
gtgcactggtaccaccagaagccaggccaggcccctgtgctggtcgtctat

SEQ ID NO: 9815 - DNA, 51 bp, synthetic construct
  misc_feature 1..51: note = Synthetic construct
  source 1..51: mol_type = other DNA
atcgcatggcatcagcagcagccagagaagggccctcggtacttgatgaag

SEQ ID NO: 9816 - DNA, 51 bp, synthetic construct
  misc_feature 1..51: note = Synthetic construct
  source 1..51: mol_type = other DNA
ttagcctggtatcagcagaaaccagggaaagttcctaagctcctgatctat

SEQ ID NO: 9817 - DNA, 46 bp, synthetic construct
  misc_feature 1..46: note = Synthetic construct
  source 1..46: mol_type = other DNA
ggggtatcagcaagtcccaggatcggcccccaaagtcctcatgtat

SEQ ID NO: 9818 - DNA, 51 bp, synthetic construct
  misc_feature 1..51: note = Synthetic construct
  source 1..51: mol_type = other DNA
ttgaattggtatcagcagagacccgggaaagcccctcaactcctgatctat

SEQ ID NO: 9819 - DNA, 51 bp, synthetic construct
  misc_feature 1..51: note = Synthetic construct
  source 1..51: mol_type = other DNA
gtttcttggtaccagcagaaggcaggccaggcccctgtgttggtgatatat

SEQ ID NO: 9820 - DNA, 51 bp, synthetic construct
  misc_feature 1..51: note = Synthetic construct
  source 1..51: mol_type = other DNA
ttaaattggtatcagcagaagccagggaaagcccctaagctcctgatctat

SEQ ID NO: 9821 - DNA, 51 bp, synthetic construct
  misc_feature 1..51: note = Synthetic construct
  source 1..51: mol_type = other DNA
ttaggctggtatcagaagaagccagggaaagcccctaagctcctgatctat

SEQ ID NO: 9822 - DNA, 51 bp, synthetic construct
  misc_feature 1..51: note = Synthetic construct
  source 1..51: mol_type = other DNA
ttagcctggcaccaacagaaacctggccaggctcccaggctcctcatctat

SEQ ID NO: 9823 - DNA, 51 bp, synthetic construct
  misc_feature 1..51: note = Synthetic construct
  source 1..51: mol_type = other DNA
ttagcctggtaccaacagaggcctggccaggctccccggctcctcatctat

SEQ ID NO: 9824 - DNA, 51 bp, synthetic construct
  misc_feature 1..51: note = Synthetic construct
  source 1..51: mol_type = other DNA
ccaagctggtaccagcagaagccaggacaggcccctgtacttgtcatctat

SEQ ID NO: 9825 - DNA, 51 bp, synthetic construct
  misc_feature 1..51: note = Synthetic construct
  source 1..51: mol_type = other DNA
gtgcagtggtaccagcagcgcccgggcagtgcccccaccacagtgatctat

SEQ ID NO: 9826 - DNA, 51 bp, synthetic construct
  misc_feature 1..51: note = Synthetic construct
  source 1..51: mol_type = other DNA
gcaacctggtaccagcagaggccaggacaggcccccatacttgtcctctat

SEQ ID NO: 9827 - DNA, 51 bp, synthetic construct
  misc_feature 1..51: note = Synthetic construct
  source 1..51: mol_type = other DNA
gcttgctggtatcagcagaagccaggccagtcccctgtgctggtcatctat

SEQ ID NO: 9828 - DNA, 51 bp, synthetic construct
  misc_feature 1..51: note = Synthetic construct
  source 1..51: mol_type = other DNA
ttggcctggtatcagcagaaaccagggaaaacccctaagctcctgatctat

SEQ ID NO: 9829 - DNA, 51 bp, synthetic construct
  misc_feature 1..51: note = Synthetic construct
  source 1..51: mol_type = other DNA
gtagcctggtatcagcagaaagcagggaaagcccccaagctcctgatctct

SEQ ID NO: 9830 - DNA, 51 bp, synthetic construct
  misc_feature 1..51: note = Synthetic construct
  source 1..51: mol_type = other DNA
ttagtctggtaccaacagaaacctggccaggctcccagggtcgtcatctct

SEQ ID NO: 9831 - DNA, 51 bp, synthetic construct
  misc_feature 1..51: note = Synthetic construct
  source 1..51: mol_type = other DNA
ttagcctggtaccagcagaagcctggccaggctcccaggctcctcatctat

SEQ ID NO: 9832 - DNA, 51 bp, synthetic construct
  misc_feature 1..51: note = Synthetic construct
  source 1..51: mol_type = other DNA
ttggcctggtatcagcagagaccagggaaagcccctaaagtcctgatctat

SEQ ID NO: 9833 - DNA, 51 bp, synthetic construct
  misc_feature 1..51: note = Synthetic construct
  source 1..51: mol_type = other DNA
gtgcactggtaccagcagaagtcaggccaggcccctgtggtggtcgtgtat

SEQ ID NO: 9834 - DNA, 51 bp, synthetic construct
  misc_feature 1..51: note = Synthetic construct
  source 1..51: mol_type = other DNA
ttggcctggtatcagcacaaaccagggacagcccctattctcctaatttat

SEQ ID NO: 9835 - DNA, 51 bp, synthetic construct
  misc_feature 1..51: note = Synthetic construct
  source 1..51: mol_type = other DNA
gtaaactggtaccagcagctcccaggaacggcccccaaactcctcatctat

SEQ ID NO: 9836 - DNA, 51 bp, synthetic construct
  misc_feature 1..51: note = Synthetic construct
  source 1..51: mol_type = other DNA
ttagcctggtaccagcagatacctggccaggctcccaggctcctcatctat

SEQ ID NO: 9837 - DNA, 51 bp, synthetic construct
  misc_feature 1..51: note = Synthetic construct
  source 1..51: mol_type = other DNA
ttggcttggtatcagcagaaaccgggaaaaggccctagtctcctaatatat

SEQ ID NO: 9838 - DNA, 51 bp, synthetic construct
  misc_feature 1..51: note = Synthetic construct
  source 1..51: mol_type = other DNA
ttagcttggtatcagcaaagaccaggacagcctcctaacctcctcatttac

SEQ ID NO: 9839 - DNA, 51 bp, synthetic construct
  misc_feature 1..51: note = Synthetic construct
  source 1..51: mol_type = other DNA
gagagttggtaccgacagaagccgggacaagccccactcactgtcctgtat

SEQ ID NO: 9840 - DNA, 51 bp, synthetic construct
  misc_feature 1..51: note = Synthetic construct
  source 1..51: mol_type = other DNA
gcaacgtggtaccaacagaagccaggacaggcccctgtacttgtcatgtat

SEQ ID NO: 9841 - DNA, 51 bp, synthetic construct
  misc_feature 1..51: note = Synthetic construct
  source 1..51: mol_type = other DNA
ttagcctggtaccagcaaaaacctggccaggctcccacactcctcatctat

SEQ ID NO: 9842 - DNA, 51 bp, synthetic construct
  misc_feature 1..51: note = Synthetic construct
  source 1..51: mol_type = other DNA
gtacactggtaccagcaccttccaggaacagcccccaaactcctcatctat

SEQ ID NO: 9843 - DNA, 51 bp, synthetic construct
  misc_feature 1..51: note = Synthetic construct
  source 1..51: mol_type = other DNA
gtgcactggtaccagcagaagccaggccaggcccctgtgttggtcctctct

SEQ ID NO: 9844 - DNA, 51 bp, synthetic construct
  misc_feature 1..51: note = Synthetic construct
  source 1..51: mol_type = other DNA
ttggcctggtttcagcagaaaccagggaaagcccctaaactcctgatctat

SEQ ID NO: 9845 - DNA, 51 bp, synthetic construct
  misc_feature 1..51: note = Synthetic construct
  source 1..51: mol_type = other DNA
ttagcctggtaccaacagaaacctggccagtctcccagattcctcatctat

SEQ ID NO: 9846 - DNA, 51 bp, synthetic construct
  misc_feature 1..51: note = Synthetic construct
  source 1..51: mol_type = other DNA
ttagcctggtaccagcacaaatctggccggcctcccaggctcctcatctat

SEQ ID NO: 9847 - DNA, 51 bp, synthetic construct
  misc_feature 1..51: note = Synthetic construct
  source 1..51: mol_type = other DNA
gtatcctggtaccagcagttcccaggaacagcccccaaactcctcatttat

SEQ ID NO: 9848 - DNA, 51 bp, synthetic construct
  misc_feature 1..51: note = Synthetic construct
  source 1..51: mol_type = other DNA
gtctcctggtatcagcaactcccaggaaaagccccccgactcctaatttat

SEQ ID NO: 9849 - DNA, 51 bp, synthetic construct
  misc_feature 1..51: note = Synthetic construct
  source 1..51: mol_type = other DNA
gtgcactggtaccggcagaggtcaggccaggcccctgtactggtcgtctat

SEQ ID NO: 9850 - DNA, 51 bp, synthetic construct
  misc_feature 1..51: note = Synthetic construct
  source 1..51: mol_type = other DNA
ttaaattggtatcggcagaaaccagggaaagcccctaagctcctcatctat

SEQ ID NO: 9851 - DNA, 51 bp, synthetic construct
  misc_feature 1..51: note = Synthetic construct
  source 1..51: mol_type = other DNA
ttggcctggtatcaacaaaaacctggccagtctcccaccctcctcatctat

SEQ ID NO: 9852 - DNA, 51 bp, synthetic construct
  misc_feature 1..51: note = Synthetic construct
  source 1..51: mol_type = other DNA
gtctcctggtaccaacaacacccaggcaaagcccccaaagtcatgatttat

SEQ ID NO: 9853 - DNA, 51 bp, synthetic construct
  misc_feature 1..51: note = Synthetic construct
  source 1..51: mol_type = other DNA
atcgcatggcatcagcagcagccagggaaggcccctcggtacttgatgaaa

SEQ ID NO: 9854 - DNA, 51 bp, synthetic construct
  misc_feature 1..51: note = Synthetic construct
  source 1..51: mol_type = other DNA
ttagcttggtatcagcagaaaccaggacagcctcctaagcttctccttaac

SEQ ID NO: 9855 - DNA, 51 bp, synthetic construct
  misc_feature 1..51: note = Synthetic construct
  source 1..51: mol_type = other DNA
ttggcctggtatcagcaaaaaccagggaaagcccctaagctcctgatctat

SEQ ID NO: 9856 - DNA, 51 bp, synthetic construct
  misc_feature 1..51: note = Synthetic construct
  source 1..51: mol_type = other DNA
ttagcctggtatcagcagaaaccagggaaggcccctaacctcctgatctat

SEQ ID NO: 9857 - DNA, 51 bp, synthetic construct
  misc_feature 1..51: note = Synthetic construct
  source 1..51: mol_type = other DNA
ttagcctggtttcagcagaaaccagggagagcccctaagtccttgatctct

SEQ ID NO: 9858 - DNA, 51 bp, synthetic construct
  misc_feature 1..51: note = Synthetic construct
  source 1..51: mol_type = other DNA
ctggcctggtatcagcagaaaccggggaaagcccctaaactcctgatctct

SEQ ID NO: 9859 - DNA, 51 bp, synthetic construct
  misc_feature 1..51: note = Synthetic construct
  source 1..51: mol_type = other DNA
ttagcctggtaccaacagaaacctggccaggctcccagcctcctcatcttt

SEQ ID NO: 9860 - DNA, 51 bp, synthetic construct
  misc_feature 1..51: note = Synthetic construct
  source 1..51: mol_type = other DNA
ccctactggttccagcagaaacctggccaagcccccaggactctaatttat

SEQ ID NO: 9861 - DNA, 51 bp, synthetic construct
  misc_feature 1..51: note = Synthetic construct
  source 1..51: mol_type = other DNA
gtctcctggtaccaacaaaacccaggcaaagcccccaaagtcatgatttat

SEQ ID NO: 9862 - DNA, 51 bp, synthetic construct
  misc_feature 1..51: note = Synthetic construct
  source 1..51: mol_type = other DNA
ttaaattggtatcagcagaaaccagggaaagcccctaaactcctgatctac

SEQ ID NO: 9863 - DNA, 51 bp, synthetic construct
  misc_feature 1..51: note = Synthetic construct
  source 1..51: mol_type = other DNA
ttggcctggtatcagcacaaaccagggaaagcccccaagctcctgatctat

SEQ ID NO: 9864 - DNA, 51 bp, synthetic construct
  misc_feature 1..51: note = Synthetic construct
  source 1..51: mol_type = other DNA
ttgagctggtttcaccagaggccaggccaatctccaaggcgcctgatttat

SEQ ID NO: 9865 - DNA, 51 bp, synthetic construct
  misc_feature 1..51: note = Synthetic construct
  source 1..51: mol_type = other DNA
ttagcctggtaccaacttaaacctggccaggctcccaggctcctcatctct

SEQ ID NO: 9866 - DNA, 51 bp, synthetic construct
  misc_feature 1..51: note = Synthetic construct
  source 1..51: mol_type = other DNA
atctcctggtatcagcaatacccaggggaagcccccgaactcattattttt

SEQ ID NO: 9867 - DNA, 51 bp, synthetic construct
  misc_feature 1..51: note = Synthetic construct
  source 1..51: mol_type = other DNA
ttggcttggtaccagcaaaagccgggacagccccctaagttgctcatttac

SEQ ID NO: 9868 - DNA, 51 bp, synthetic construct
  misc_feature 1..51: note = Synthetic construct
  source 1..51: mol_type = other DNA
ttggcctggtatcagcagaaaccagggaaagcccctaaactcctaatctat

SEQ ID NO: 9869 - DNA, 51 bp, synthetic construct
  misc_feature 1..51: note = Synthetic construct
  source 1..51: mol_type = other DNA
ttcgcctggtaccagcagaagcctggccaggctcccaccctcctcatctct

SEQ ID NO: 9870 - DNA, 51 bp, synthetic construct
  misc_feature 1..51: note = Synthetic construct
  source 1..51: mol_type = other DNA
ttggcctggtatcagcagaaacctggccaggctcccagtctcctcatctat

SEQ ID NO: 9871 - DNA, 51 bp, synthetic construct
  misc_feature 1..51: note = Synthetic construct
  source 1..51: mol_type = other DNA
ttagcctggtatcagcagaaaccagggaaagcccctaagctcctgctctat

SEQ ID NO: 9872 - DNA, 51 bp, synthetic construct
  misc_feature 1..51: note = Synthetic construct
  source 1..51: mol_type = other DNA
ttaaattggtatcagcaaaaaccagggaaagcccctaagctcctgatctat

SEQ ID NO: 9873 - DNA, 51 bp, synthetic construct
  misc_feature 1..51: note = Synthetic construct
  source 1..51: mol_type = other DNA
gcttattggtaccagcagaagtcaggccaggcccctgtgctggtcatccat

SEQ ID NO: 9874 - DNA, 51 bp, synthetic construct
  misc_feature 1..51: note = Synthetic construct
  source 1..51: mol_type = other DNA
ttaaactggtatcaacataaaccagggaaagccccaaaactcctgatcttc

SEQ ID NO: 9875 - DNA, 51 bp, synthetic construct
  misc_feature 1..51: note = Synthetic construct
  source 1..51: mol_type = other DNA
ttagcctggtttcagcagaaaccagggaaagcccctaagtccctgatctat

SEQ ID NO: 9876 - DNA, 51 bp, synthetic construct
  misc_feature 1..51: note = Synthetic construct
  source 1..51: mol_type = other DNA
ttagcctggtaccagcagagacctggccaggctcccaggctcctcatctct

SEQ ID NO: 9877 - DNA, 51 bp, synthetic construct
  misc_feature 1..51: note = Synthetic construct
  source 1..51: mol_type = other DNA
ttagcctggtacaagcagatgcctggccaggctcccaggctcctcatctat

SEQ ID NO: 9878 - DNA, 51 bp, synthetic construct
  misc_feature 1..51: note = Synthetic construct
  source 1..51: mol_type = other DNA
ttacactggtaccagcagaaaccaaatcagtctccaaaggtcctcatcaaa

SEQ ID NO: 9879 - DNA, 51 bp, synthetic construct
  misc_feature 1..51: note = Synthetic construct
  source 1..51: mol_type = other DNA
ttagcctggtatcaacagaaaccagggaaagcccctaagctcctgatctat

SEQ ID NO: 9880 - DNA, 51 bp, synthetic construct
  misc_feature 1..51: note = Synthetic construct
  source 1..51: mol_type = other DNA
ttaaattggtatcaacagagacctgggaaagcccctcagctcctgatctat

SEQ ID NO: 9881 - DNA, 51 bp, synthetic construct
  misc_feature 1..51: note = Synthetic construct
  source 1..51: mol_type = other DNA
ttagcttggtatcagcgcaaaccaggacagcctcctaagttgctcatttac

SEQ ID NO: 9882 - DNA, 51 bp, synthetic construct
  misc_feature 1..51: note = Synthetic construct
  source 1..51: mol_type = other DNA
ttagcctggtttcagcagaaaccagggaaagtccctaagcgcctgatctat

SEQ ID NO: 9883 - DNA, 51 bp, synthetic construct
  misc_feature 1..51: note = Synthetic construct
  source 1..51: mol_type = other DNA
gtctcctggtaccaacaaaagccaggcaaagcccccaaactcatgatttat

SEQ ID NO: 9884 - DNA, 51 bp, synthetic construct
  misc_feature 1..51: note = Synthetic construct
  source 1..51: mol_type = other DNA
gtctcctggtaccaaaaccacccaggcaaagcccccaaactcttgatttat

SEQ ID NO: 9885 - DNA, 51 bp, synthetic construct
  misc_feature 1..51: note = Synthetic construct
  source 1..51: mol_type = other DNA
atttcatggtatcaacagaagccaggccagtcccctctattggtcatctat

SEQ ID NO: 9886 - DNA, 51 bp, synthetic construct
  misc_feature 1..51: note = Synthetic construct
  source 1..51: mol_type = other DNA
gcaaactggtaccagcagaagccaggacaggcccctaaacttatcctctat

SEQ ID NO: 9887 - DNA, 51 bp, synthetic construct
  misc_feature 1..51: note = Synthetic construct
  source 1..51: mol_type = other DNA
ttaaattggtatcagcagaaaccagggaaagcccctaagctcctgatctac

SEQ ID NO: 9888 - DNA, 51 bp, synthetic construct
  misc_feature 1..51: note = Synthetic construct
  source 1..51: mol_type = other DNA
ttgtattgctttctgcagaaatgcaggccagtctccacactcctgatctat

SEQ ID NO: 9889 - DNA, 51 bp, synthetic construct
  misc_feature 1..51: note = Synthetic construct
  source 1..51: mol_type = other DNA
gtgcagtggtaccagcagcgcccgggcagtgtccccaacaatgtgatctat

SEQ ID NO: 9890 - DNA, 51 bp, synthetic construct
  misc_feature 1..51: note = Synthetic construct
  source 1..51: mol_type = other DNA
gtctcctggtaccaacaacacccaggcaatgcccccaaagtcatgatttat

SEQ ID NO: 9891 - DNA, 15 bp, synthetic construct
  misc_feature 1..15: note = Synthetic construct
  source 1..15: mol_type = other DNA
gtccgtgggctttat

SEQ ID NO: 9892 - DNA, 51 bp, synthetic construct
  misc_feature 1..51: note = Synthetic construct
  source 1..51: mol_type = other DNA
gtggcctggtatcagcagaaaccagggaaagcccctaagctcctgatctat

SEQ ID NO: 9893 - DNA, 51 bp, synthetic construct
  misc_feature 1..51: note = Synthetic construct
  source 1..51: mol_type = other DNA
ttagcctggtaccaacaaaaacctggccaggctcccaggctcctcatctat

SEQ ID NO: 9894 - DNA, 51 bp, synthetic construct; identical to SEQ ID NO: 1849
  misc_feature 1..51: note = Synthetic construct
  source 1..51: mol_type = other DNA

SEQ ID NO: 9895 - DNA, 51 bp, synthetic construct
  misc_feature 1..51: note = Synthetic construct
  source 1..51: mol_type = other DNA
ttagcttggtaccagcagaaaccacgacagcctcctcagctgctcatttac

SEQ ID NO: 9896 - DNA, 51 bp, synthetic construct
  misc_feature 1..51: note = Synthetic construct
  source 1..51: mol_type = other DNA
cccagttggtaccagcagaccccaggccagcccccacgctcgctcatctac

SEQ ID NO: 9897 - DNA, 51 bp, synthetic construct
  misc_feature 1..51: note = Synthetic construct
  source 1..51: mol_type = other DNA
ttcacttggtttcaacagaggccaggccaatctccaaggcgcctaatttat

SEQ ID NO: 9898 - DNA, 51 bp, synthetic construct
  misc_feature 1..51: note = Synthetic construct
  source 1..51: mol_type = other DNA
cccatctggtaccagcagaccccaggccaggctccacgcacgctcatctac

SEQ ID NO: 9899 - DNA, 51 bp, synthetic construct
  misc_feature 1..51: note = Synthetic construct
  source 1..51: mol_type = other DNA
gctcggtggttccagcagaagccaggccaggcccctgtgctggtgatttat

SEQ ID NO: 9900 - DNA, 51 bp, synthetic construct; identical to SEQ ID NO: 1847
  misc_feature 1..51: note = Synthetic construct
  source 1..51: mol_type = other DNA

SEQ ID NO: 9901 - DNA, 51 bp, synthetic construct
  misc_feature 1..51: note = Synthetic construct
  source 1..51: mol_type = other DNA
ttagattggtatcagcagaaaccagggaaagcccctaaactcctgatttat

SEQ ID NO: 9902 - DNA, 51 bp, synthetic construct
  misc_feature 1..51: note = Synthetic construct
  source 1..51: mol_type = other DNA
ttagtctggtaccaacagaaacctggccaggctcccaggctcctcacctat

SEQ ID NO: 9903 - DNA, 51 bp, synthetic construct
  misc_feature 1..51: note = Synthetic construct
  source 1..51: mol_type = other DNA
ttaaattggtttcaccagaggccaggccaatctccaaggcgcctcatttat

SEQ ID NO: 9904 - DNA, 51 bp, synthetic construct
  misc_feature 1..51: note = Synthetic construct
  source 1..51: mol_type = other DNA
gtgcactggtaccagaagaagtcaggccaggcccctgtgctcgtcgtctat

SEQ ID NO: 9905 - DNA, 51 bp, synthetic construct
  misc_feature 1..51: note = Synthetic construct
  source 1..51: mol_type = other DNA
gtgcagtggtaccaacagcgcccgggcagcgcccccgtctctgtgatctat

SEQ ID NO: 9906 - DNA, 51 bp, synthetic construct
  misc_feature 1..51: note = Synthetic construct
  source 1..51: mol_type = other DNA
ctggcctggtatcagcagaagccagggaaagcccctaagctcctgatctat

SEQ ID NO: 9907 - DNA, 51 bp, synthetic construct
  misc_feature 1..51: note = Synthetic construct
  source 1..51: mol_type = other DNA
ttggcctggtaccagcacaaacgtggccaggctccccggctcctcatctat

SEQ ID NO: 9908 - DNA, 51 bp, synthetic construct
  misc_feature 1..51: note = Synthetic construct
  source 1..51: mol_type = other DNA
ttagcttggtaccagcataaaccaggacagtctcctaaactgctcatttac

SEQ ID NO: 9909 - DNA, 51 bp, synthetic construct
  misc_feature 1..51: note = Synthetic construct
  source 1..51: mol_type = other DNA
gtgcactggtaccagcagaagtcaggccaggcccctgtgttggtcgtctat

SEQ ID NO: 9910 - DNA, 51 bp, synthetic construct
  misc_feature 1..51: note = Synthetic construct
  source 1..51: mol_type = other DNA
ttaaattggtatcagcagaaacctgggaaagcccctaacctcctgatctat

SEQ ID NO: 9911 - DNA, 51 bp, synthetic construct
  misc_feature 1..51: note = Synthetic construct
  source 1..51: mol_type = other DNA
gtgcagtggtaccagcaacgcccgggcagtgcccccacaactgtgctctat

SEQ ID NO: 9912 - DNA, 51 bp, synthetic construct
  misc_feature 1..51: note = Synthetic construct
  source 1..51: mol_type = other DNA
ataaggtggtaccaacaaaagccagggaaccctccccggtatctcctgtac

SEQ ID NO: 9913 - DNA, 51 bp, synthetic construct
  misc_feature 1..51: note = Synthetic construct
  source 1..51: mol_type = other DNA
gtaaactggtaccagcaactcccaggaacggcccccaaattcctcatctat

SEQ ID NO: 9914 - DNA, 51 bp, synthetic construct
  misc_feature 1..51: note = Synthetic construct
  source 1..51: mol_type = other DNA
ttagcctggtatcagcaaaaaccaggaaaagcccctaaactcctcatccat

SEQ ID NO: 9915 - DNA, 51 bp, synthetic construct
  misc_feature 1..51: note = Synthetic construct
  source 1..51: mol_type = other DNA
gtatcctggtaccagcagctcccaggaacagcccccaaactcctcatttat

SEQ ID NO: 9916 - DNA, 51 bp, synthetic construct
  misc_feature 1..51: note = Synthetic construct
  source 1..51: mol_type = other DNA
ttagcctggtatcagcataaaccggggacagcccctaaactcctgatctat

SEQ ID NO: 9917 - DNA, 51 bp, synthetic construct
  misc_feature 1..51: note = Synthetic construct
  source 1..51: mol_type = other DNA
ttagcttggtatcagcagaaaccaggacagcctcctaagctgctcattttc

SEQ ID NO: 9918 - DNA, 51 bp, synthetic construct
  misc_feature 1..51: note = Synthetic construct
  source 1..51: mol_type = other DNA
gtgcagtggtaccagcagcgcccgggcagcgcccccaccattttgatctat

SEQ ID NO: 9919 - DNA, 51 bp, synthetic construct
  misc_feature 1..51: note = Synthetic construct
  source 1..51: mol_type = other DNA
gtgcattggtatttgcagaagccaggccgggcccctgttttggtcgtcttt

SEQ ID NO: 9920 - DNA, 51 bp, synthetic construct
  misc_feature 1..51: note = Synthetic construct
  source 1..51: mol_type = other DNA
gtctcctggtatcaacatcacccaggcagagcccccaaactcatgatttat

SEQ ID NO: 9921 - DNA, 51 bp, synthetic construct
  misc_feature 1..51: note = Synthetic construct
  source 1..51: mol_type = other DNA
gcaagctggtaccagcagaggccaggacaggcccctgttcttgtcatctat

SEQ ID NO: 9922 - DNA, 51 bp, synthetic construct
  misc_feature 1..51: note = Synthetic construct
  source 1..51: mol_type = other DNA
ttggcctggtatcagcagaagcccgggaaagcccctaaactcctgatctat

SEQ ID NO: 9923 - DNA, 51 bp, synthetic construct
  misc_feature 1..51: note = Synthetic construct
  source 1..51: mol_type = other DNA
ttggcctggtatcagcagaaaccagggaaagcccctaagctcctgatctct

SEQ ID NO: 9924 - DNA, 51 bp, synthetic construct
  misc_feature 1..51: note = Synthetic construct
  source 1..51: mol_type = other DNA
ttgagttggtttcatcagaggccaggccaatctccgaggcgcctaatttat

SEQ ID NO: 9925 - DNA, 51 bp, synthetic construct
  misc_feature 1..51: note = Synthetic construct
  source 1..51: mol_type = other DNA
ttggcctggtatcagcagaaaccagggaaagtccctaagctcctgatctat

SEQ ID NO: 9926 - DNA, 51 bp, synthetic construct
  misc_feature 1..51: note = Synthetic construct
  source 1..51: mol_type = other DNA
ttaggctggtttcagcacaaaccaggcaaagcccctcagcgcctcatctat

SEQ ID NO: 9927 - DNA, 51 bp, synthetic construct
  misc_feature 1..51: note = Synthetic construct
  source 1..51: mol_type = other DNA
gcttattggtaccagcagaagccaggccaggcccctgtgttggtgatatat

SEQ ID NO: 9928 - DNA, 51 bp, synthetic construct
  misc_feature 1..51: note = Synthetic construct
  source 1..51: mol_type = other DNA
gtcaactggtaccagcagcttccaggaacagtccccaaactcctcatttat

SEQ ID NO: 9929 - DNA, 51 bp, synthetic construct
  misc_feature 1..51: note = Synthetic construct
  source 1..51: mol_type = other DNA
ttagcctggtaccaacagaaacctggccagggtcccaggctcctcatctat

SEQ ID NO: 9930 - DNA, 51 bp, synthetic construct
  misc_feature 1..51: note = Synthetic construct
  source 1..51: mol_type = other DNA
ttaaattggtatcaggtgacaccaggtaaagcccctaagctcctgatctac

SEQ ID NO: 9931 - DNA, 51 bp, synthetic construct
  misc_feature 1..51: note = Synthetic construct
  source 1..51: mol_type = other DNA
gtctcctggtaccaacagcacccaggcaaagcccccaaactcttcatttat

SEQ ID NO: 9932 - DNA, 51 bp, synthetic construct
  misc_feature 1..51: note = Synthetic construct
  source 1..51: mol_type = other DNA
ttagcctggtttcagcagaaaccaggggaagcccctaagtccctgctctat

SEQ ID NO: 9933 - DNA, 51 bp, synthetic construct
  misc_feature 1..51: note = Synthetic construct
  source 1..51: mol_type = other DNA
ttgagttggcttcaggagaggccaggccagcctccaagactcctaatttat

SEQ ID NO: 9934 - DNA, 51 bp, synthetic construct
  misc_feature 1..51: note = Synthetic construct
  source 1..51: mol_type = other DNA
ttagcctggtaccagcataaacctggccaggctcccaggctcctcatctat

SEQ ID NO: 9935 - DNA, 51 bp, synthetic construct
  misc_feature 1..51: note = Synthetic construct
  source 1..51: mol_type = other DNA
gtctcctggtaccaacaaaacccaggcaaagtccccaaactcatgatttct

SEQ ID NO: 9936 - DNA, 51 bp, synthetic construct
  misc_feature 1..51: note = Synthetic construct
  source 1..51: mol_type = other DNA
ttggattggtacatgcagaggccagggcagtctccacagctcctgatctat

SEQ ID NO: 9937 - DNA, 51 bp, synthetic construct
  misc_feature 1..51: note = Synthetic construct
  source 1..51: mol_type = other DNA
ttcgcctggtaccaacagaaacctggccagcctcccaggctcctcatgtct

SEQ ID NO: 9938 - DNA, 51 bp, synthetic construct
  misc_feature 1..51: note = Synthetic construct
  source 1..51: mol_type = other DNA
gtctcctggtaccaacaaaacccaggcaaagcccccaaactcttgatttat

SEQ ID NO: 9939 - DNA, 51 bp, synthetic construct
  misc_feature 1..51: note = Synthetic construct
  source 1..51: mol_type = other DNA
gtctcctggtaccaacaacacccaggcaaagcccccaaactcaggatttat

SEQ ID NO: 9940 - DNA, 51 bp, synthetic construct
  misc_feature 1..51: note = Synthetic construct
  source 1..51: mol_type = other DNA
ttagcctggtatcagcagaaaccagggaaagcccctaagctcctgatctat

SEQ ID NO: 9941 - DNA, 51 bp, synthetic construct
  misc_feature 1..51: note = Synthetic construct
  source 1..51: mol_type = other DNA
gtgcactggtaccagcagaagccaggccaggcccctatcctggtcgtctat

SEQ ID NO: 9942 - DNA, 51 bp, synthetic construct
  misc_feature 1..51: note = Synthetic construct
  source 1..51: mol_type = other DNA
ttagcctggtatcaacaaaagccagggaaagcccctaagctcctgatatat

SEQ ID NO: 9943 - DNA, 51 bp, synthetic construct
  misc_feature 1..51: note = Synthetic construct
  source 1..51: mol_type = other DNA
ttagcctggtaccagcacaaacctggccaggttcccaggctcatcttcttt

SEQ ID NO: 9944 - DNA, 51 bp, synthetic construct
  misc_feature 1..51: note = Synthetic construct
  source 1..51: mol_type = other DNA
gtgcagtggtaccagcagcgcccgggcagtgcccccacgactgtgatctat

SEQ ID NO: 9945 - DNA, 51 bp, synthetic construct
  misc_feature 1..51: note = Synthetic construct
  source 1..51: mol_type = other DNA
ttagcctggtatcagcagaaaccagggaaggcccctaaactcctcgtctat

SEQ ID NO: 9946 - DNA, 51 bp, synthetic construct
  misc_feature 1..51: note = Synthetic construct
  source 1..51: mol_type = other DNA
gtatcctggtaccaacaattcccaggcacagcccccaaactcctcatttat

SEQ ID NO: 9947 - DNA, 49 bp, synthetic construct
  misc_feature 1..49: note = Synthetic construct
  source 1..49: mol_type = other DNA
acactggtaccagcacaaaccagatcagtctccaaaactgctcatcaag

SEQ ID NO: 9948 - DNA, 51 bp, synthetic construct
  misc_feature 1..51: note = Synthetic construct
  source 1..51: mol_type = other DNA
gtagcctggtatcagcaaaaaccgggagaagtccctaagctcctgatctat

SEQ ID NO: 9949 - DNA, 51 bp, synthetic construct
  misc_feature 1..51: note = Synthetic construct
  source 1..51: mol_type = other DNA
gttacctggtatcagcagaagccaggccagtcccctgtgttggtcatgtat

SEQ ID NO: 9950 - DNA, 51 bp, synthetic construct
  misc_feature 1..51: note = Synthetic construct
  source 1..51: mol_type = other DNA
ttaaattggtatcagcagaaaccggggaaagcccctaggctcctgatctat

SEQ ID NO: 9951 - DNA, 51 bp, synthetic construct
  misc_feature 1..51: note = Synthetic construct
  source 1..51: mol_type = other DNA
gtctcctggtaccaacagcacccaggcaaagcccccaaactcataattcat

SEQ ID NO: 9952 - DNA, 51 bp, synthetic construct
  misc_feature 1..51: note = Synthetic construct
  source 1..51: mol_type = other DNA
gtctcctggtaccaaaaccacccaggcaaagcccccaaactcatgatttat

SEQ ID NO: 9953 - DNA, 51 bp, synthetic construct
  misc_feature 1..51: note = Synthetic construct
  source 1..51: mol_type = other DNA
ttagcttggtaccagcagaaaccaggacagcctcctcagctcctcatttac

SEQ ID NO: 9954 - DNA, 51 bp, synthetic construct
  misc_feature 1..51: note = Synthetic construct
  source 1..51: mol_type = other DNA
gtctcctggtaccaacagcacccaggcaatgcccccaaactcatgatttat

SEQ ID NO: 9955 - DNA, 51 bp, synthetic construct
  misc_feature 1..51: note = Synthetic construct
  source 1..51: mol_type = other DNA
acttgctggtatcaacagaaggcaggccagtcccctgttctggtcatctat

SEQ ID NO: 9956 - DNA, 51 bp, synthetic construct
  misc_feature 1..51: note = Synthetic construct
  source 1..51: mol_type = other DNA
ttaaattggtatcaacagaggccaggccaatctccaaggcgcctcgtttat

SEQ ID NO: 9957 - DNA, 51 bp, synthetic construct
  misc_feature 1..51: note = Synthetic construct
  source 1..51: mol_type = other DNA
ttagcttggtaccagcagaaacccggacagcctcctgaactgctcatttac

SEQ ID NO: 9958 - DNA, 51 bp, synthetic construct
  misc_feature 1..51: note = Synthetic construct
  source 1..51: mol_type = other DNA
cccagttggttccggcagaccccaggccaggctccacgcacgctcatctac

SEQ ID NO: 9959 - DNA, 51 bp, synthetic construct
  misc_feature 1..51: note = Synthetic construct
  source 1..51: mol_type = other DNA
ttggcctggtatcagcagaaaccaggtaaagcccctaaactcctgatctct

SEQ ID NO: 9960 - DNA, 51 bp, synthetic construct
  misc_feature 1..51: note = Synthetic construct
  source 1..51: mol_type = other DNA
ccctactggttccagcagaagcctggccaagccccccggacactgatttat

SEQ ID NO: 9961 - DNA, 51 bp, synthetic construct
  misc_feature 1..51: note = Synthetic construct
  source 1..51: mol_type = other DNA
ttagcttggtaccagcagaaaccaggacagcctcctaaactgctcatttac

SEQ ID NO: 9962 - DNA, 51 bp, synthetic construct
  misc_feature 1..51: note = Synthetic construct
  source 1..51: mol_type = other DNA
ttgtattggtttctgcagaaagccaggccagtctccacgctcctgatctat

SEQ ID NO: 9963 - DNA, 51 bp, synthetic construct
  misc_feature 1..51: note = Synthetic construct
  source 1..51: mol_type = other DNA
ttagtctggtatcagcagaaaccagggaaagcccctaacctcctgatctat

SEQ ID NO: 9964 - DNA, 51 bp, synthetic construct
  misc_feature 1..51: note = Synthetic construct
  source 1..51: mol_type = other DNA
ttagcttggtaccagcagaaaccaggacagcctccaaagctgctcatttac

SEQ ID NO: 9965 - DNA, 51 bp, synthetic construct
  misc_feature 1..51: note = Synthetic construct
  source 1..51: mol_type = other DNA
ttggcctggtaccagcagaaacttggccaggctcccaggctcctcatctat

SEQ ID NO: 9966 - DNA, 51 bp, synthetic construct
  misc_feature 1..51: note = Synthetic construct
  source 1..51: mol_type = other DNA
gtcacctggtaccaacagcacccaggcaaagcccccaaagtcatgatttat

SEQ ID NO: 9967 - DNA, 51 bp, synthetic construct
  misc_feature 1..51: note = Synthetic construct
  source 1..51: mol_type = other DNA
acaagctggtaccagcagaagccaggacaggcccctgtacttgtcatctat

SEQ ID NO: 9968 - DNA, 51 bp, synthetic construct
  misc_feature 1..51: note = Synthetic construct
  source 1..51: mol_type = other DNA
gtctcctggtaccaacaacacccaggcaaagcccccaaactcataatttat

SEQ ID NO: 9969 - DNA, 51 bp, synthetic construct
  misc_feature 1..51: note = Synthetic construct
  source 1..51: mol_type = other DNA
ttagcctggtttcagcagaagccagggaaagcccctaagtcactaatttat

SEQ ID NO: 9970 - DNA, 51 bp, synthetic construct
  misc_feature 1..51: note = Synthetic construct
  source 1..51: mol_type = other DNA
gtccactggtaccagcagaggccaggccaggcccctgtactggtcgtctct

SEQ ID NO: 9971 - DNA, 51 bp, synthetic construct
  misc_feature 1..51: note = Synthetic construct
  source 1..51: mol_type = other DNA
ttagcctggtaccagcagaaacctggccaggctccccggctcctcatctat

SEQ ID NO: 9972 - DNA, 51 bp, synthetic construct
  misc_feature 1..51: note = Synthetic construct
  source 1..51: mol_type = other DNA
ttggcctggtaccagcagaggccaggccagcctcccaggctcctcatcttt

SEQ ID NO: 9973 - DNA, 51 bp, synthetic construct
  misc_feature 1..51: note = Synthetic construct
  source 1..51: mol_type = other DNA
gtcacctggtaccaacaactcccagggaaagcccccaaactcttaattttt

SEQ ID NO: 9974 - DNA, 51 bp, synthetic construct
  misc_feature 1..51: note = Synthetic construct
  source 1..51: mol_type = other DNA
ttagcttggtaccagcagaaaccaggacagcctcctaagctgctgttttac

SEQ ID NO: 9975 - DNA, 51 bp, synthetic construct
  misc_feature 1..51: note = Synthetic construct
  source 1..51: mol_type = other DNA
gtacattggtaccagcacaaggcgcgccaggccccagtactggtcgtctat

SEQ ID NO: 9976 - DNA, 51 bp, synthetic construct
  misc_feature 1..51: note = Synthetic construct
  source 1..51: mol_type = other DNA
ttagcctggtaccagcagaaacctggccaggttcccaggctcctcttctat

SEQ ID NO: 9977 - DNA, 51 bp, synthetic construct
  misc_feature 1..51: note = Synthetic construct
  source 1..51: mol_type = other DNA
ttagcctggtaccagcagaaacctggccaggctcccaggctcctcatatat

SEQ ID NO: 9978 - DNA, 51 bp, synthetic construct
  misc_feature 1..51: note = Synthetic construct
  source 1..51: mol_type = other DNA
ttagcctggtaccaacagaaacctggccgggctcccaggctcctcatctat

SEQ ID NO: 9979 - DNA, 51 bp, synthetic construct
  misc_feature 1..51: note = Synthetic construct
  source 1..51: mol_type = other DNA
ttagcctggtaccagcagagacctggccaggctcccaggctcctcatcttt

SEQ ID NO: 9980 - DNA, 51 bp, synthetic construct
  misc_feature 1..51: note = Synthetic construct
  source 1..51: mol_type = other DNA
ttaaattggtatcagcagaaaccagggaaagcccctaagctcctgatccat

SEQ ID NO: 9981 - DNA, 51 bp, synthetic construct
  misc_feature 1..51: note = Synthetic construct
  source 1..51: mol_type = other DNA
gtatcctggttccagcagctcccaagtagagcccccaaactcctcatctat

SEQ ID NO: 9982 - DNA, 51 bp, synthetic construct; identical to SEQ ID NO: 1848
  misc_feature 1..51: note = Synthetic construct
  source 1..51: mol_type = other DNA

SEQ ID NO: 9983 - DNA, 51 bp, synthetic construct
  misc_feature 1..51: note = Synthetic construct
  source 1..51: mol_type = other DNA
ttagcctggtttcagcagaaacctgggaaagcccctaagtccctgatctat

SEQ ID NO: 9984 - DNA, 51 bp, synthetic construct
  misc_feature 1..51: note = Synthetic construct
  source 1..51: mol_type = other DNA
atagcctggtaccagcagagaccgaggcgaccgcctactcttctcatctac

SEQ ID NO: 9985 - DNA, 51 bp, synthetic construct
  misc_feature 1..51: note = Synthetic construct
  source 1..51: mol_type = other DNA
ctggcctggtatcagcagaaaccagggaaagcccctaagctcctgatctat

SEQ ID NO: 9986 - DNA, 51 bp, synthetic construct
  misc_feature 1..51: note = Synthetic construct
  source 1..51: mol_type = other DNA
gttttctggtatcagcagaagccaggccagtcccctgtcctggtcatctat

SEQ ID NO: 9987 - DNA, 51 bp, synthetic construct
  misc_feature 1..51: note = Synthetic construct
  source 1..51: mol_type = other DNA
ttagcctggtatcaacagaaacctggacaggcgcccaggctcctcatttat

SEQ ID NO: 9988 - DNA, 51 bp, synthetic construct
  misc_feature 1..51: note = Synthetic construct
  source 1..51: mol_type = other DNA
ttagcctggtaccaacagaaacctggccaggctcccaggctcctcatcttt

SEQ ID NO: 9989 - DNA, 51 bp, synthetic construct
  misc_feature 1..51: note = Synthetic construct
  source 1..51: mol_type = other DNA
ttcaattggttccttcagaggccaggccaacctccaaggcgtcttttttat

SEQ ID NO: 9990 - DNA, 51 bp, synthetic construct
  misc_feature 1..51: note = Synthetic construct
  source 1..51: mol_type = other DNA
ttaaattggtatcttcagaaaccagggaaagcccctaacctcttaatctat

SEQ ID NO: 9991 - DNA, 51 bp, synthetic construct
  misc_feature 1..51: note = Synthetic construct
  source 1..51: mol_type = other DNA
gttttctggtaccagctcctcccaggaacggcccccagactcctcatgtct

SEQ ID NO: 9992 - DNA, 51 bp, synthetic construct
  misc_feature 1..51: note = Synthetic construct
  source 1..51: mol_type = other DNA
gcagcttggctgcagcagcaccagggccaccctcccaagctcctatcctac

SEQ ID NO: 9993 - DNA, 51 bp, synthetic construct
  misc_feature 1..51: note = Synthetic construct
  source 1..51: mol_type = other DNA
ttggcctggtatcagcagaaaccagggaaagcccctaagctcatgctccat

SEQ ID NO: 9994 - DNA, 51 bp, synthetic construct
  misc_feature 1..51: note = Synthetic construct
  source 1..51: mol_type = other DNA
gtctcctggtaccaacaacagccaggcaaagcccccaaactcctgattttt

SEQ ID NO: 9995 - DNA, 51 bp, synthetic construct
  misc_feature 1..51: note = Synthetic construct
  source 1..51: mol_type = other DNA
ttagcctggtaccatcagaaacctggccaggcgcccaggctcctcatatat

SEQ ID NO: 9996 - DNA, 51 bp, synthetic construct
  misc_feature 1..51: note = Synthetic construct
  source 1..51: mol_type = other DNA
gtggattggttcctgcagaagccagggcagtctccacagctcgtcatccac

SEQ ID NO: 9997 - DNA, 51 bp, synthetic construct
  misc_feature 1..51: note = Synthetic construct
  source 1..51: mol_type = other DNA
ttagcctggtatcagcagaaaccagggaaacccccaaaactcctgatctct

SEQ ID NO: 9998 - DNA, 51 bp, synthetic construct; identical to SEQ ID NO: 1851
  misc_feature 1..51: note = Synthetic construct
  source 1..51: mol_type = other DNA

SEQ ID NO: 9999 - DNA, 51 bp, synthetic construct
  misc_feature 1..51: note = Synthetic construct
  source 1..51: mol_type = other DNA
ttaggctggtatcagcagaagccagggaaagcccctaagcgcctgatctat

SEQ ID NO: 10000 - DNA, 51 bp, synthetic construct
  misc_feature 1..51: note = Synthetic construct
  source 1..51: mol_type = other DNA
atagcctggtatcaacaaaaaccaggacaaggccctaacctcctaatacac

SEQ ID NO: 10001 - DNA, 51 bp, synthetic construct
  misc_feature 1..51: note = Synthetic construct
  source 1..51: mol_type = other DNA
ttagcttggtaccagcagaaaccagggcagcctcctaagatgctcttttac

SEQ ID NO: 10002 - DNA, 51 bp, synthetic construct
  misc_feature 1..51: note = Synthetic construct
  source 1..51: mol_type = other DNA
gtctcctggtaccaacagcgcccaggcgaagcccccaaactcttgatttat

SEQ ID NO: 10003 - DNA, 51 bp, synthetic construct
  misc_feature 1..51: note = Synthetic construct
  source 1..51: mol_type = other DNA
ttagcctggtaccagcagaagccaggacagcctcctaggttgctcatttac

SEQ ID NO: 10004 - DNA, 51 bp, synthetic construct
  misc_feature 1..51: note = Synthetic construct
  source 1..51: mol_type = other DNA
ttggcctggtttcagcagaaaccagggaaagcccctaggctcctgatctat

SEQ ID NO: 10005 - DNA, 51 bp, synthetic construct
  misc_feature 1..51: note = Synthetic construct
  source 1..51: mol_type = other DNA
gtggcctggtatcagcagagaccagggaaagcccctaaggtcctgatctct

SEQ ID NO: 10006 - DNA, 51 bp, synthetic construct
  misc_feature 1..51: note = Synthetic construct
  source 1..51: mol_type = other DNA
ttaaattggtatcagcagaaacctgggaaagcccctaagttcctgatctat

SEQ ID NO: 10007 - DNA, 51 bp, synthetic construct
  misc_feature 1..51: note = Synthetic construct
  source 1..51: mol_type = other DNA
gtgcactggtaccagcagaagccaggccaggcccctgtgttggtcgtctat

SEQ ID NO: 10008 - DNA, 51 bp, synthetic construct
  misc_feature 1..51: note = Synthetic construct
  source 1..51: mol_type = other DNA
gtgtcctggtatcagcaactccctggaacagcccccacactcctcatttat

SEQ ID NO: 10009 - DNA, 51 bp, synthetic construct
  misc_feature 1..51: note = Synthetic construct
  source 1..51: mol_type = other DNA
ttatcttggttccagcagaaacctggtcaggctcccaggctcctcgtctat

SEQ ID NO: 10010 - DNA, 32 bp, synthetic construct
  misc_feature 1..32: note = Synthetic construct
  source 1..32: mol_type = other DNA
acccaggcaaagcccccaaactcatgatttat

SEQ ID NO: 10011 - DNA, 51 bp, synthetic construct
  misc_feature 1..51: note = Synthetic construct
  source 1..51: mol_type = other DNA
gtctcctggtaccaacaccacccaggcagggcccccaaattcattatgtat

SEQ ID NO: 10012 - DNA, 51 bp, synthetic construct
  misc_feature 1..51: note = Synthetic construct
  source 1..51: mol_type = other DNA
atagcctggtatcagcagaaagctggccagagtcccaggctcctcatctct

SEQ ID NO: 10013 - DNA, 51 bp, synthetic construct
  misc_feature 1..51: note = Synthetic construct
  source 1..51: mol_type = other DNA
ttggcctggtatcagcagaaaccagggacagcccctaaactcctggtctct

SEQ ID NO: 10014 - DNA, 51 bp, synthetic construct
  misc_feature 1..51: note = Synthetic construct
  source 1..51: mol_type = other DNA
ttaaattggtttcagcagaaaccggggagcgcccctaaactcctcatctat

SEQ ID NO: 10015 - DNA, 51 bp, synthetic construct
  misc_feature 1..51: note = Synthetic construct
  source 1..51: mol_type = other DNA
ttagcctggtaccaacagaagcctggccaggctcccaggctcctcatctat

SEQ ID NO: 10016 - DNA, 51 bp, synthetic construct
  misc_feature 1..51: note = Synthetic construct
  source 1..51: mol_type = other DNA
gttcactggtaccagttgaggccaggccaggcccctgtgttggtcatccat

SEQ ID NO: 10017 - DNA, 51 bp, synthetic construct
  misc_feature 1..51: note = Synthetic construct
  source 1..51: mol_type = other DNA
gtgtcctggtaccagcatgtcccaggagcagcccccaaactcctcatttat

SEQ ID NO: 10018 - DNA, 51 bp, synthetic construct
  misc_feature 1..51: note = Synthetic construct
  source 1..51: mol_type = other DNA
gtttcctggcaccagcagttcccaggaacagcccccaaaatcctcatttat

SEQ ID NO: 10019 - DNA, 51 bp, synthetic construct
  misc_feature 1..51: note = Synthetic construct
  source 1..51: mol_type = other DNA
ttagcttggtaccaacagaagccaggacagcccccaaagttgctcatttac

SEQ ID NO: 10020 - DNA, 51 bp, synthetic construct
  misc_feature 1..51: note = Synthetic construct
  source 1..51: mol_type = other DNA
gttaactggtaccagcacctcccaggagcgccccccaaactcctcatctat

SEQ ID NO: 10021 - DNA, 51 bp, synthetic construct
  misc_feature 1..51: note = Synthetic construct
  source 1..51: mol_type = other DNA
gtctcctggtaccaacagcgcccagggaaagccccccaactcatcatttat

SEQ ID NO: 10022 - DNA, 51 bp, synthetic construct
  misc_feature 1..51: note = Synthetic construct
  source 1..51: mol_type = other DNA
ttagcctggtaccagcagaagcctggccaggctcccaggctcctcatctac

SEQ ID NO: 10023 - DNA, 51 bp, synthetic construct
  misc_feature 1..51: note = Synthetic construct
  source 1..51: mol_type = other DNA
gtgaactggtaccagcagaagccaggccaggcccctgcgctggtcgtctat

SEQ ID NO: 10024 - DNA, 51 bp, synthetic construct
  misc_feature 1..51: note = Synthetic construct
  source 1..51: mol_type = other DNA
ttggcttggtaccagcacaaaccggggcagcctcctaaactgctcctttac

SEQ ID NO: 10025 - DNA, 51 bp, synthetic construct
  misc_feature 1..51: note = Synthetic construct
  source 1..51: mol_type = other DNA
ttgaattggtatcagcagaaaccagggaaagcccctaaactcctgatctat

SEQ ID NO: 10026 - DNA, 51 bp, synthetic construct
  misc_feature 1..51: note = Synthetic construct
  source 1..51: mol_type = other DNA
ttagcctggtatcagcagaaaccagggaaagcccctaaactcctgatctat

SEQ ID NO: 10027 - DNA, 51 bp, synthetic construct
  misc_feature 1..51: note = Synthetic construct
  source 1..51: mol_type = other DNA
gtatcctggtaccagcagctcccaggaacagcccccaaactcctcattttt

SEQ ID NO: 10028 - DNA, 51 bp, synthetic construct
  misc_feature 1..51: note = Synthetic construct
  source 1..51: mol_type = other DNA
gtctcttggtaccaacaacacccaggcaaagcccccaaactcataatttac

SEQ ID NO: 10029 - DNA, 51 bp, synthetic construct
  misc_feature 1..51: note = Synthetic construct
  source 1..51: mol_type = other DNA
ttagcctggtatcggcagagaccaggggaagcccccaaactcctgatttat

SEQ ID NO: 10030 - DNA, 51 bp, synthetic construct
  misc_feature 1..51: note = Synthetic construct
  source 1..51: mol_type = other DNA
gtatactggtatcagcagctcccaggaacggcccccaaactcctcgtctat

SEQ ID NO: 10031 - DNA, 51 bp, synthetic construct
  misc_feature 1..51: note = Synthetic construct
  source 1..51: mol_type = other DNA
ttatattggtacgtgcagaagccaggccagtcaccacagctcctgatctac

SEQ ID NO: 10032 - DNA, 51 bp, synthetic construct
  misc_feature 1..51: note = Synthetic construct
  source 1..51: mol_type = other DNA
gtatcctggtaccagcagatcccaggaacagcccccaaactcctcatctat

SEQ ID NO: 10033 - DNA, 51 bp, synthetic construct
  misc_feature 1..51: note = Synthetic construct
  source 1..51: mol_type = other DNA
ataaactggtaccagcagctcccaggaacggcccccaaactcctcatctat

SEQ ID NO: 10034 - DNA, 51 bp, synthetic construct
  misc_feature 1..51: note = Synthetic construct
  source 1..51: mol_type = other DNA
gtgaactggtacctacagaaaccaggagaagctactcttttcattactcaa

SEQ ID NO: 10035 - DNA, 51 bp, synthetic construct
  misc_feature 1..51: note = Synthetic construct
  source 1..51: mol_type = other DNA
ttaaattggtttcagcagaaaccagggaaagcccctaagctcctgatctat

SEQ ID NO: 10036 - DNA, 51 bp, synthetic construct
  misc_feature 1..51: note = Synthetic construct
  source 1..51: mol_type = other DNA
ttagcctggtatcagcagaaaccagggaacgcccctaaactcctggtctct

SEQ ID NO: 10037 - DNA, 51 bp, synthetic construct
  misc_feature 1..51: note = Synthetic construct
  source 1..51: mol_type = other DNA
ttaacctggcttcagcagagaccagggcaagcccctaagcgcctcatcttt

SEQ ID NO: 10038 - DNA, 51 bp, synthetic construct
  misc_feature 1..51: note = Synthetic construct
  source 1..51: mol_type = other DNA
actcattggtaccagcagaagccaggccaggcccctgtgttggtaatatgt

SEQ ID NO: 10039 - DNA, 51 bp, synthetic construct
  misc_feature 1..51: note = Synthetic construct
  source 1..51: mol_type = other DNA
ttaaattggtatcaagtgaagcctgggaaaggccctaaattcctgatgtcc

SEQ ID NO: 10040 - DNA, 51 bp, synthetic construct
  misc_feature 1..51: note = Synthetic construct
  source 1..51: mol_type = other DNA
ctagcctggtatcagcagaaaccagggaaagcccctaaactcctgatcgct

SEQ ID NO: 10041 - DNA, 51 bp, synthetic construct
  misc_feature 1..51: note = Synthetic construct
  source 1..51: mol_type = other DNA
ctagcttggtaccaacagaaagcaggacagcctcctaagctgctcttcttc

SEQ ID NO: 10042 - DNA, 51 bp, synthetic construct
  misc_feature 1..51: note = Synthetic construct
  source 1..51: mol_type = other DNA
gtctcctggtttcaacaacacccaggcagagcccccaaactcatgatttat

SEQ ID NO: 10043 - DNA, 51 bp, synthetic construct
  misc_feature 1..51: note = Synthetic construct
  source 1..51: mol_type = other DNA
ttagcctggtaccagcagaaacctggccaggctcccaggctcctcttctat

SEQ ID NO: 10044 - DNA, 51 bp, synthetic construct
  misc_feature 1..51: note = Synthetic construct
  source 1..51: mol_type = other DNA
ttaaattggtatcagcagaaaccagggaaagcccctcagctcctgatctat

SEQ ID NO: 10045 - DNA, 51 bp, synthetic construct
  misc_feature 1..51: note = Synthetic construct
  source 1..51: mol_type = other DNA
ttagcctggtaccaacagagacctggccaggctcccaggctcctcatctat

SEQ ID NO: 10046 - DNA, 51 bp, synthetic construct
  misc_feature 1..51: note = Synthetic construct
  source 1..51: mol_type = other DNA
gtacattggtaccagcaccttccagggacagcccccaaactcctcatctat

SEQ ID NO: 10047 - DNA, 51 bp, synthetic construct
  misc_feature 1..51: note = Synthetic construct
  source 1..51: mol_type = other DNA
gccaattggtaccagcagaagtcaggacaggccccgaaacttgtcatttat

SEQ ID NO: 10048 - DNA, 51 bp, synthetic construct
  misc_feature 1..51: note = Synthetic construct
  source 1..51: mol_type = other DNA
ttagcctggtaccaacagaaacctggccagtctcccaggctcctcatctat

SEQ ID NO: 10049 - DNA, 51 bp, synthetic construct
  misc_feature 1..51: note = Synthetic construct
  source 1..51: mol_type = other DNA
ttgacttggcttcagcagaggccaggccagcctccaagactcctcatttat

SEQ ID NO: 10050 - DNA, 51 bp, synthetic construct
  misc_feature 1..51: note = Synthetic construct
  source 1..51: mol_type = other DNA
ttagcctggtatcaacagaagccagggaaagcccctaaactcctgatatat

SEQ ID NO: 10051 - DNA, 51 bp, synthetic construct
  misc_feature 1..51: note = Synthetic construct
  source 1..51: mol_type = other DNA
ttacactggtaccagcaaaaatcaaatcagtctccacagctcctcatcaag

SEQ ID NO: 10052 - DNA, 51 bp, synthetic construct
  misc_feature 1..51: note = Synthetic construct
  source 1..51: mol_type = other DNA
ttaaattggtatcaaaagaagccagggacagcccctaagctcctgatctat

SEQ ID NO: 10053 - DNA, 51 bp, synthetic construct
  misc_feature 1..51: note = Synthetic construct
  source 1..51: mol_type = other DNA
ttagcctggtaccagcagaaacctggccaggctcccagactcctcatctat

SEQ ID NO: 10054 - DNA, 51 bp, synthetic construct
  misc_feature 1..51: note = Synthetic construct
  source 1..51: mol_type = other DNA
ttagcctggtatcaacagagaccagggaaagcccctaaactcctcctctat

SEQ ID NO: 10055 - DNA, 51 bp, synthetic construct
  misc_feature 1..51: note = Synthetic construct
  source 1..51: mol_type = other DNA
gtctcctggtaccaacaaaacccaggcaaagcccccaaagtcttgatttat

SEQ ID NO: 10056 - DNA, 51 bp, synthetic construct
  misc_feature 1..51: note = Synthetic construct
  source 1..51: mol_type = other DNA
atattttggtatcagcagaagccagggagccctcccaggtatctcctatat

SEQ ID NO: 10057 - DNA, 51 bp, synthetic construct
  misc_feature 1..51: note = Synthetic construct
  source 1..51: mol_type = other DNA
ttaaattggtatcagtggaaaccagggaaagcccctaaggtcctgatttac

SEQ ID NO: 10058 - DNA, 29 bp, synthetic construct
  misc_feature 1..29: note = Synthetic construct
  source 1..29: mol_type = other DNA
caggcaaagcccccaaagtcttgatttat

SEQ ID NO: 10059 - DNA, 51 bp, synthetic construct
  misc_feature 1..51: note = Synthetic construct
  source 1..51: mol_type = other DNA
ttagcctggtatcagcagaaagcagggaaggccccaaagctcctgatctat

SEQ ID NO: 10060 - DNA, 51 bp, synthetic construct
  misc_feature 1..51: note = Synthetic construct
  source 1..51: mol_type = other DNA
ttagcctggtaccagtacaaatctggccaggctcccaaactcctcatcttt

SEQ ID NO: 10061 - DNA, 51 bp, synthetic construct
  misc_feature 1..51: note = Synthetic construct
  source 1..51: mol_type = other DNA
gtctcctggtatcagcagttcccaggagcagcccccgaactcctccttttt

SEQ ID NO: 10062 - DNA, 51 bp, synthetic construct
  misc_feature 1..51: note = Synthetic construct
  source 1..51: mol_type = other DNA
gtgcagtggtaccagcagaagccaggccaggcccctgtgctggtcgtctat

SEQ ID NO: 10063 - DNA, 51 bp, synthetic construct
  misc_feature 1..51: note = Synthetic construct
  source 1..51: mol_type = other DNA
ttaggttggtaccagcagaaaccaggacagcctcctaagttgctcctttac

SEQ ID NO: 10064 - DNA, 51 bp, synthetic construct
  misc_feature 1..51: note = Synthetic construct
  source 1..51: mol_type = other DNA
gtaaattggtaccagcagctcccaggaacggcccccaaactcctcatttat

SEQ ID NO: 10065 - DNA, 51 bp, synthetic construct
  misc_feature 1..51: note = Synthetic construct
  source 1..51: mol_type = other DNA
atacactggtaccaggaccttccaggaacagcccccaaactcctcatctat

SEQ ID NO: 10066 - DNA, 51 bp, synthetic construct
  misc_feature 1..51: note = Synthetic construct
  source 1..51: mol_type = other DNA
gttaattggtaccagcatcgctcaggatcggcccccaaagtcctcatctat

SEQ ID NO: 10067 - DNA, 51 bp, synthetic construct
  misc_feature 1..51: note = Synthetic construct
  source 1..51: mol_type = other DNA
gtgtattggtatcgacagaagtcaggccaggcccctttactggtcgtctct

SEQ ID NO: 10068 - DNA, 51 bp, synthetic construct
  misc_feature 1..51: note = Synthetic construct
  source 1..51: mol_type = other DNA
gtttcctggtaccagcacttcccaggaacagcccccaaactcttcatttat

SEQ ID NO: 10069 - DNA, 51 bp, synthetic construct
  misc_feature 1..51: note = Synthetic construct
  source 1..51: mol_type = other DNA
ttagcctggtatcagcagaaaccagggaaagcccctaagctcctactctat

SEQ ID NO: 10070 - DNA, 51 bp, synthetic construct
  misc_feature 1..51: note = Synthetic construct
  source 1..51: mol_type = other DNA
ttggactggtatctgcagaggccagggcagtctccacaactcctgatctat

SEQ ID NO: 10071 - DNA, 51 bp, synthetic construct
  misc_feature 1..51: note = Synthetic construct
  source 1..51: mol_type = other DNA
ttaaattggtatcagcagagacctgggaaggcccctaaactcctgatcttt

SEQ ID NO: 10072 - DNA, 51 bp, synthetic construct
  misc_feature 1..51: note = Synthetic construct
  source 1..51: mol_type = other DNA
gtctcctggtatcaacaatacccaggcaaagcccccaaactcatgatttat

SEQ ID NO: 10073 - DNA, 51 bp, synthetic construct
  misc_feature 1..51: note = Synthetic construct
  source 1..51: mol_type = other DNA
ttggattggtatttgcagaagccagggcagtctccacagctcctgatctat

SEQ ID NO: 10074 - DNA, 51 bp, synthetic construct
  misc_feature 1..51: note = Synthetic construct
  source 1..51: mol_type = other DNA
gtatcctggtaccagcagctcccaggaacagcccccaaactcctcatctat

SEQ ID NO: 10075 - DNA, 51 bp, synthetic construct
  misc_feature 1..51: note = Synthetic construct
  source 1..51: mol_type = other DNA
ttaaattggtatcagcacaaacctgggaaagcccctaaactcctgatctac

SEQ ID NO: 10076 - DNA, 51 bp, synthetic construct
  misc_feature 1..51: note = Synthetic construct
  source 1..51: mol_type = other DNA
ttagcctggtatcagcaaaaaccagggaaagcccctaagctcctgatctct

SEQ ID NO: 10077 - DNA, 51 bp, synthetic construct
  misc_feature 1..51: note = Synthetic construct
  source 1..51: mol_type = other DNA
ttagcctggtatcagcagaaaccagggaaagcccctaggctcctgatccat

SEQ ID NO: 10078 - DNA, 51 bp, synthetic construct
  misc_feature 1..51: note = Synthetic construct
  source 1..51: mol_type = other DNA
ttagcctggtttcagcagagaccagggaaagtccctaagcgcctgatctat

SEQ ID NO: 10079 - DNA, 51 bp, synthetic construct
  misc_feature 1..51: note = Synthetic construct
  source 1..51: mol_type = other DNA
ttagcttggtaccagcagaaaccaggacagcctcctaagctcctcatttac

SEQ ID NO: 10080 - DNA, 51 bp, synthetic construct
  misc_feature 1..51: note = Synthetic construct
  source 1..51: mol_type = other DNA
ttagtctggtaccagcagaaacctggccaggctcccaggctcctcatctat

SEQ ID NO: 10081 - DNA, 51 bp, synthetic construct
  misc_feature 1..51: note = Synthetic construct
  source 1..51: mol_type = other DNA
atcgcatggcatcagcagcagccagagaagggccctcgatatttgatgaag

SEQ ID NO: 10082 - DNA, 51 bp, synthetic construct
  misc_feature 1..51: note = Synthetic construct
  source 1..51: mol_type = other DNA
attcactggtaccaacagattcaaggagcagcccccaaactcctcatctat

SEQ ID NO: 10083 - DNA, 51 bp, synthetic construct
  misc_feature 1..51: note = Synthetic construct
  source 1..51: mol_type = other DNA
ttagcctggtaccagcagaaacctggccaggctcccaggctcctcatcttt

SEQ ID NO: 10084 - DNA, 51 bp, synthetic construct
  misc_feature 1..51: note = Synthetic construct
  source 1..51: mol_type = other DNA
tttgcctggtaccaacagaaacctggccaggctccccgactcctcatctat

SEQ ID NO: 10085 - DNA, 51 bp, synthetic construct
  misc_feature 1..51: note = Synthetic construct
  source 1..51: mol_type = other DNA
ttagcctggtatcagcagaaaccagggaaagttcctaagctcctaatctat

SEQ ID NO: 10086 - DNA, 51 bp, synthetic construct
  misc_feature 1..51: note = Synthetic construct
  source 1..51: mol_type = other DNA
ccaaactggttccagcagaaacctggacaagcacccagggcactgatttat

SEQ ID NO: 10087 - DNA, 51 bp, synthetic construct
  misc_feature 1..51: note = Synthetic construct
  source 1..51: mol_type = other DNA
ttggcctggtatcagcagaagccagggaaagcccctaaactcctgatcttt

SEQ ID NO: 10088 - DNA, 51 bp, synthetic construct
  misc_feature 1..51: note = Synthetic construct
  source 1..51: mol_type = other DNA
ggatgctggtaccagcagaaggcaggacaggcccctgtacttgtcatctat

SEQ ID NO: 10089 - DNA, 51 bp, synthetic construct
  misc_feature 1..51: note = Synthetic construct
  source 1..51: mol_type = other DNA
ttaaattggtatcaacaaaagccagggaaagcccctcacctcctgatctac

SEQ ID NO: 10090 - DNA, 51 bp, synthetic construct
  misc_feature 1..51: note = Synthetic construct
  source 1..51: mol_type = other DNA
ttaaattggtatcagcaaaaaccagggaaagcccctaatttcctgatcttt

SEQ ID NO: 10091 - DNA, 51 bp, synthetic construct
  misc_feature 1..51: note = Synthetic construct
  source 1..51: mol_type = other DNA
ttggactggtacctgcagaagccagggcagtctccacagctcctaatctat

SEQ ID NO: 10092 - DNA, 51 bp, synthetic construct
  misc_feature 1..51: note = Synthetic construct
  source 1..51: mol_type = other DNA
ttagcttggtaccagcagaaaccaggacagcctcctgaggtgctcatttac

SEQ ID NO: 10093 - DNA, 12 bp, synthetic construct
  misc_feature 1..12: note = Synthetic construct
  source 1..12: mol_type = other DNA
ctgctcgtctat

SEQ ID NO: 10094 - DNA, 51 bp, synthetic construct
  misc_feature 1..51: note = Synthetic construct
  source 1..51: mol_type = other DNA
ttaaattggtatcagcacaagtcagggacagcccctaaactactaatctct

SEQ ID NO: 10095 - DNA, 51 bp, synthetic construct
  misc_feature 1..51: note = Synthetic construct
  source 1..51: mol_type = other DNA
ttaaattggtatcagcagagaccagggaaagcccctaacctcctgatctat

SEQ ID NO: 10096 - DNA, 51 bp, synthetic construct
  misc_feature 1..51: note = Synthetic construct
  source 1..51: mol_type = other DNA
gtctcctggtaccaacagcacccaggcagaacccccaaactcataatttat

SEQ ID NO: 10097 - DNA, 51 bp, synthetic construct
  misc_feature 1..51: note = Synthetic construct
  source 1..51: mol_type = other DNA
ttagcctggtaccaacagaaacctggccagcctcccaggctcctcatctat

SEQ ID NO: 10098 - DNA, 51 bp, synthetic construct
  misc_feature 1..51: note = Synthetic construct
  source 1..51: mol_type = other DNA
acttcttggtatcaacagaagccaggccagtcccctgtattggtcatctat

SEQ ID NO: 10099 - DNA, 51 bp, synthetic construct
  misc_feature 1..51: note = Synthetic construct
  source 1..51: mol_type = other DNA
ttagcttggtatcagcagaaaccagggcagcctcctaaactcctcctttac

SEQ ID NO: 10100 - DNA, 51 bp, synthetic construct
  misc_feature 1..51: note = Synthetic construct
  source 1..51: mol_type = other DNA
gtgaagtggtaccagcaggtcccaggaacggcgcccaaactcctcatttat

SEQ ID NO: 10101 - DNA, 51 bp, synthetic construct
  misc_feature 1..51: note = Synthetic construct
  source 1..51: mol_type = other DNA
gtttcgtggtaccaacacctcccaggaacagcccccaaactcgtcatctat

SEQ ID NO: 10102 - DNA, 51 bp, synthetic construct
  misc_feature 1..51: note = Synthetic construct
  source 1..51: mol_type = other DNA
ctagcctggtatcaacaaggaccagggaaagcccctaagctcctgatctat

SEQ ID NO: 10103 - DNA, 51 bp, synthetic construct
  misc_feature 1..51: note = Synthetic construct
  source 1..51: mol_type = other DNA
ttaaattggtatcagcaaaaaccagggaaagcccctcagctcctgatctat

SEQ ID NO: 10104 - DNA, 51 bp, synthetic construct
  misc_feature 1..51: note = Synthetic construct
  source 1..51: mol_type = other DNA
gtacactggtatcagaaacttccaggagtagcccccaaactcctcatctat

SEQ ID NO: 10105 - DNA, 47 bp, synthetic construct
  misc_feature 1..47: note = Synthetic construct
  source 1..47: mol_type = other DNA
gggggttccagcagaagccaggccaggcccctgtgttggtgatatat

SEQ ID NO: 10106 - DNA, 51 bp, synthetic construct
  misc_feature 1..51: note = Synthetic construct
  source 1..51: mol_type = other DNA
gtggcctggtatcagcagaaaccagggaaagcccctaagctcctcatctat

SEQ ID NO: 10107 - DNA, 51 bp, synthetic construct
  misc_feature 1..51: note = Synthetic construct
  source 1..51: mol_type = other DNA
gtaaattggtatcagcagaaaccagggaaagcccctaacctcctgatctat

SEQ ID NO: 10108 - DNA, 51 bp, synthetic construct
  misc_feature 1..51: note = Synthetic construct
  source 1..51: mol_type = other DNA
ttagcctggtaccagcaaaaacctggccaggctcccaggctcctcatcttt

SEQ ID NO: 10109 - DNA, 51 bp, synthetic construct
  misc_feature 1..51: note = Synthetic construct
  source 1..51: mol_type = other DNA
gttcactggtatcagcttcttccaggaacagcccccaaactcctcatctat

SEQ ID NO: 10110 - DNA, 51 bp, synthetic construct
  misc_feature 1..51: note = Synthetic construct
  source 1..51: mol_type = other DNA
ttaaattggtatcaacagagacctgggaaggcccctaaactcctgatcttt

SEQ ID NO: 10111 - DNA, 51 bp, synthetic construct
  misc_feature 1..51: note = Synthetic construct
  source 1..51: mol_type = other DNA
ttagcctggtaccagcaaaagggtggccaggctcccaggctcctcattcat

SEQ ID NO: 10112 - DNA, 51 bp, synthetic construct
  misc_feature 1..51: note = Synthetic construct
  source 1..51: mol_type = other DNA
ttaaattggcttcaggagaggccaggccaatctccaaggcgccttatttat

SEQ ID NO: 10113 - DNA, 51 bp, synthetic construct
  misc_feature 1..51: note = Synthetic construct
  source 1..51: mol_type = other DNA
gtctcctggtaccaacaacaaccagggaaagcccccagactcttgatcttt

SEQ ID NO: 10114 - DNA, 51 bp, synthetic construct
  misc_feature 1..51: note = Synthetic construct
  source 1..51: mol_type = other DNA
gtacactggtatcagaagaggccaggccaggccccggtgctgctcgtctat

SEQ ID NO: 10115 - DNA, 51 bp, synthetic construct
  misc_feature 1..51: note = Synthetic construct
  source 1..51: mol_type = other DNA
ctagcttggtatcagcagaaaccaggacagcgtcctaagttgctcatttat

SEQ ID NO: 10116 - DNA, 51 bp, synthetic construct
  misc_feature 1..51: note = Synthetic construct
  source 1..51: mol_type = other DNA
gtagcctggttccagtataatgttggccggcctcccaggctcctcatctat

SEQ ID NO: 10117 - DNA, 51 bp, synthetic construct
  misc_feature 1..51: note = Synthetic construct
  source 1..51: mol_type = other DNA
gtccactggtaccagcagaagccaggccaggcccctgtgttggtcgtctat

SEQ ID NO: 10118 - DNA, 51 bp, synthetic construct
  misc_feature 1..51: note = Synthetic construct
  source 1..51: mol_type = other DNA
ttaggctggtatcagcagaaaccagggacagcccctaagctcctgatctat

SEQ ID NO: 10119 - DNA, 51 bp, synthetic construct
  misc_feature 1..51: note = Synthetic construct
  source 1..51: mol_type = other DNA
ttagcctggtatcagctaaaaccagggaaagcccctaagctcctgatctat

SEQ ID NO: 10120 - DNA, 51 bp, synthetic construct
  misc_feature 1..51: note = Synthetic construct
  source 1..51: mol_type = other DNA
ttaaattggtatcagcacaaaccagggaaagcccctaagttcctgatttat

SEQ ID NO: 10121 - DNA, 51 bp, synthetic construct
  misc_feature 1..51: note = Synthetic construct
  source 1..51: mol_type = other DNA
ttagcctggtaccaactgaaacctggccaggctcccaggctcctcatctat

SEQ ID NO: 10122 - DNA, 51 bp, synthetic construct
  misc_feature 1..51: note = Synthetic construct
  source 1..51: mol_type = other DNA
gtgcactggtgccagcaaacgccaggccaggaccctctgctggtcatctat

SEQ ID NO: 10123 - DNA, 31 bp, synthetic construct
  misc_feature 1..31: note = Synthetic construct
  source 1..31: mol_type = other DNA
cccaggcaaagcccccaaactcatgatttat

SEQ ID NO: 10124 - DNA, 51 bp, synthetic construct
  misc_feature 1..51: note = Synthetic construct
  source 1..51: mol_type = other DNA
gtgcactggtaccgacagaagccaggccaggcccctgttttggtcgtctat

SEQ ID NO: 10125 - DNA, 51 bp, synthetic construct
  misc_feature 1..51: note = Synthetic construct
  source 1..51: mol_type = other DNA
gtctcctggtaccagcaactcccaggaacagcccccagactcctcatctat

SEQ ID NO: 10126 - DNA, 51 bp, synthetic construct
  misc_feature 1..51: note = Synthetic construct
  source 1..51: mol_type = other DNA
ttgtattggtacctgcagaagccaggccagtctccacagctcctaatctat

SEQ ID NO: 10127 - DNA, 51 bp, synthetic construct
  misc_feature 1..51: note = Synthetic construct
  source 1..51: mol_type = other DNA
ttagcctggtatcagcagaagcctggccaggctcccagactcctcatctat

SEQ ID NO: 10128 - DNA, 51 bp, synthetic construct
  misc_feature 1..51: note = Synthetic construct
  source 1..51: mol_type = other DNA
gtctcctggtaccaacagcacccaggcaaagcccccaaactcatgatttct

SEQ ID NO: 10129 - DNA, 51 bp, synthetic construct
  misc_feature 1..51: note = Synthetic construct
  source 1..51: mol_type = other DNA
gtctcctggtaccagcaacacccaggcaaagcccccaaactcatgatttat

SEQ ID NO: 10130 - DNA, 51 bp, synthetic construct
  misc_feature 1..51: note = Synthetic construct
  source 1..51: mol_type = other DNA
gtgaactggtaccagcaactcccaggaacggcccccaaactcgtcgtctat

SEQ ID NO: 10131 - DNA, 51 bp, synthetic construct
  misc_feature 1..51: note = Synthetic construct
  source 1..51: mol_type = other DNA
ttaaattggtatcagcagacaccagggaaagcccctaaactcctgatctac

SEQ ID NO: 10132 - DNA, 51 bp, synthetic construct
  misc_feature 1..51: note = Synthetic construct
  source 1..51: mol_type = other DNA
agttattggtaccagcagaaggcaggccaggcccctcttctggtaatgtat

SEQ ID NO: 10133 - DNA, 51 bp, synthetic construct
  misc_feature 1..51: note = Synthetic construct
  source 1..51: mol_type = other DNA
ttagcctggttccaacaaaaacctggccaggctcccaggctcctcatctat

SEQ ID NO: 10134 - DNA, 51 bp, synthetic construct
  misc_feature 1..51: note = Synthetic construct
  source 1..51: mol_type = other DNA
gtctcctggtaccagcaataccctggcaaaacccccaaactcataatttat

SEQ ID NO: 10135 - DNA, 51 bp, synthetic construct
  misc_feature 1..51: note = Synthetic construct
  source 1..51: mol_type = other DNA
ttggcctggtatcagcagaaaccagggaaagcccccaagctcctgatctat

SEQ ID NO: 10136 - DNA, 51 bp, synthetic construct
  misc_feature 1..51: note = Synthetic construct
  source 1..51: mol_type = other DNA
ttggcctggtaccagcagaagcctggccaggctcccaggctcctcatctat

SEQ ID NO: 10137 - DNA, 51 bp, synthetic construct
  misc_feature 1..51: note = Synthetic construct
  source 1..51: mol_type = other DNA
gctttttggtaccagcagaagacaggccaggcccctcttttattactatat

SEQ ID NO: 10138 - DNA, 51 bp, synthetic construct
  misc_feature 1..51: note = Synthetic construct
  source 1..51: mol_type = other DNA
ttagcctggtaccagcagaaacctggccaggctcccagcctcctcatctat

SEQ ID NO: 10139 - DNA, 51 bp, synthetic construct
  misc_feature 1..51: note = Synthetic construct
  source 1..51: mol_type = other DNA
ttagcctggtatcagcaaaaaccaggggaagcccctaaactcctgctctat

SEQ ID NO: 10140 - DNA, 51 bp, synthetic construct
  misc_feature 1..51: note = Synthetic construct
  source 1..51: mol_type = other DNA
gtttcctggtaccagcaggtcccaggaacagcccccaaactcctcatctat

SEQ ID NO: 10141 - DNA, 51 bp, synthetic construct
  misc_feature 1..51: note = Synthetic construct
  source 1..51: mol_type = other DNA
ttaggctggtttcagcagaaaccagggaaagcccctaagcgcctgatctat

SEQ ID NO: 10142 - DNA, 51 bp, synthetic construct
  misc_feature 1..51: note = Synthetic construct
  source 1..51: mol_type = other DNA
gtctcctggtaccaacagcacccaggcaaagcccccaaactcttaatttat

SEQ ID NO: 10143 - DNA, 51 bp, synthetic construct; identical to SEQ ID NO: 1852
  misc_feature 1..51: note = Synthetic construct
  source 1..51: mol_type = other DNA

SEQ ID NO: 10144 - DNA, 51 bp, synthetic construct
  misc_feature 1..51: note = Synthetic construct
  source 1..51: mol_type = other DNA
gtgcattggtaccaactgaagccaggccaggcccctgtgctggtcgtccat

SEQ ID NO: 10145 - DNA, 51 bp, synthetic construct
  misc_feature 1..51: note = Synthetic construct
  source 1..51: mol_type = other DNA
ttagcctggtaccagcacaaacctggccaacctccccggctcctcatttat

SEQ ID NO: 10146 - DNA, 51 bp, synthetic construct
  misc_feature 1..51: note = Synthetic construct
  source 1..51: mol_type = other DNA
ttagcctggtatcaacagagaccagggaaagcccctaaactcctgatctat

SEQ ID NO: 10147 - DNA, 51 bp, synthetic construct
  misc_feature 1..51: note = Synthetic construct
  source 1..51: mol_type = other DNA
ctagcctggtaccagcagaaacctggccaggctcccaggctcctcatgtat

SEQ ID NO: 10148 - DNA, 51 bp, synthetic construct
  misc_feature 1..51: note = Synthetic construct
  source 1..51: mol_type = other DNA
gtgcactggtaccagcagaagccaggccaggccccagtgctggtcgtctat

SEQ ID NO: 10149 - DNA, 51 bp, synthetic construct
  misc_feature 1..51: note = Synthetic construct
  source 1..51: mol_type = other DNA
gtgtcctggttccaacagaagccagacaaagcccccagactcataatttat

SEQ ID NO: 10150 - DNA, 51 bp, synthetic construct
  misc_feature 1..51: note = Synthetic construct
  source 1..51: mol_type = other DNA
gtacactggtaccagcagcgtccaggaacagtccccaaactcctcatctat

SEQ ID NO: 10151 - DNA, 108 bp, synthetic construct
  misc_feature 1..108: note = Synthetic construct
  source 1..108: mol_type = other DNA
agtagggccactggcaccccagacaggttcagtggcagtgggtctgggacagacttcactctcaccatcagcagactggagcctgaagattttgcagtgtattactgt

SEQ ID NO: 10152 - DNA, 108 bp, synthetic construct
  misc_feature 1..108: note = Synthetic construct
  source 1..108: mol_type = other DNA
actttagagaatggggtcccctcacggttcagcggcagtggatttgggacagaattcactctcgccatcagcagcctgcaccctgatgattttgcaacttattactgc

SEQ ID NO: 10153 - DNA, 108 bp, synthetic construct
  misc_feature 1..108: note = Synthetic construct
  source 1..108: mol_type = other DNA
aatcggccctcgggggtttctagtcgcttctctggctccaagtctggcaacacggcctccctgaccatctctgggctccaggctgaggacgaggctgattattactgc

SEQ ID NO: 10154 - DNA, 108 bp, synthetic construct
  misc_feature 1..108: note = Synthetic construct
  source 1..108: mol_type = other DNA
agattgaaaagtggggtcccatcccgattcagtggcagtggatctgggacggattacagcctcaccatcgatagcctgcagcctgaagattttgcaacatatttctgt

SEQ ID NO: 10155 - DNA, 108 bp, synthetic construct
  misc_feature 1..108: note = Synthetic construct
  source 1..108: mol_type = other DNA
agcagggccactggcgttccagataggttcagtgccagtgggtctgggacagagttcagtctcactatcagcagactggagcctgaagattttgcagtgtattactgt

SEQ ID NO: 10156 - DNA, 108 bp, synthetic construct
  misc_feature 1..108: note = Synthetic construct
  source 1..108: mol_type = other DNA
aggagggccactggcgtcccagacaggttcagtggcagtgggtctgggacagagttcactctctccatcgccggactggagcctgaagattttggagtgtattactgt

SEQ ID NO: 10157 - DNA, 108 bp, synthetic construct
  misc_feature 1..108: note = Synthetic construct
  source 1..108: mol_type = other DNA
aacagacactcctggacacctgcccggttctcaggctccctccttgggggcgaagctgccctgaccctttcgggtgcgcagcctgaggatgaggctgactattactgc

SEQ ID NO: 10158 - DNA, 108 bp, synthetic construct
  misc_feature 1..108: note = Synthetic construct
  source 1..108: mol_type = other DNA
aagaggccctcaggtgtccctgatcgcttctctgcctccaggtctggcaacacggcctccctgaccatctctgggctccaggctgacgatgaggctgtctatttttgt

SEQ ID NO: 10159 - DNA, 108 bp, synthetic construct
  misc_feature 1..108: note = Synthetic construct
  source 1..108: mol_type = other DNA
atcagggccactggcgtcccagacaggttcagtggcagtgggtctgggacagacttcactctcaccatcagcagactggagcctgaagattttgcagtgtattactgt

SEQ ID NO: 10160 - DNA, 108 bp, synthetic construct
  misc_feature 1..108: note = Synthetic construct
  source 1..108: mol_type = other DNA
agtttagagagtggggtcccatcaaggttcagcggcagtggatctggaacagagttcactctcactatcagtagcctgcagcctgatgattttgcaacttattactgc

SEQ ID NO: 10161 - DNA, 108 bp, synthetic construct
  misc_feature 1..108: note = Synthetic construct
  source 1..108: mol_type = other DNA
aatcggccctcaggggtttccaatcgcttctctggctccaagtctggcaacacggcctccctgaccatctctggcctccaggctgaagacgaggctgattactactgc

SEQ ID NO: 10162 - DNA, 108 bp, synthetic construct
  misc_feature 1..108: note = Synthetic construct
  source 1..108: mol_type = other DNA
acccgggaatccggggtccccgaccgattcagtggcagcggctctgagacagatttcactctcaccatcagcggcctgcaggctgaagatgtggcagtttattactgt

SEQ ID NO: 10163 - DNA, 108 bp, synthetic construct
  misc_feature 1..108: note = Synthetic construct
  source 1..108: mol_type = other DNA
cagaggccttcaaatatccctgagcgattctctggttccagctcagggacaatagtcacgttgaccattagtggagtccaggcagaagacgaggctgactattactgt

SEQ ID NO: 10164 - DNA, 42 bp, synthetic construct
  misc_feature 1..42: note = Synthetic construct
  source 1..42: mol_type = other DNA
atctctgggctccaggctgacgacgaggctgattattactgc

SEQ ID NO: 10165 - DNA, 108 bp, synthetic construct
  misc_feature 1..108: note = Synthetic construct
  source 1..108: mol_type = other DNA
cacagggccactggcatcccagccaggttcagtggcagtgggtctgggacagacttcactctcaccatcaacagcctggagcctgaagattctgcagtttattactgt

SEQ ID NO: 10166 - DNA, 108 bp, synthetic construct
  misc_feature 1..108: note = Synthetic construct
  source 1..108: mol_type = other DNA
acccgggaatccggggtccctgaccgattcagtggcagcgggtctgggacagatttcactctcaccatcaacagcctgcagtctgaagatgtggcagtttattactgt

SEQ ID NO: 10167 - DNA, 108 bp, synthetic construct
  misc_feature 1..108: note = Synthetic construct
  source 1..108: mol_type = other DNA
accagggccactggcatccccgacaggttcagtggcagtgggtctgggacagacttcactctcaccgtcagcagactggagcctgaagattttgcagtctattactgt

SEQ ID NO: 10168 - DNA, 108 bp, synthetic construct
  misc_feature 1..108: note = Synthetic construct
  source 1..108: mol_type = other DNA
aatcggccctcagggatttctaatcgcttctctggctccaagtctggcaacacggcctccctgaccatctctgggctccaggctgacgacgaggctgattattactgc

SEQ ID NO: 10169 - DNA, 108 bp, synthetic construct
  misc_feature 1..108: note = Synthetic construct
  source 1..108: mol_type = other DNA
acccgggagtccggggtccctgaccgattcagtggcagcgggtctgggacagatttcaatctcaccatcagcagcctgcaggctgaagatgtggcagtttattactgt

SEQ ID NO: 10170 - DNA, 108 bp, synthetic construct
  misc_feature 1..108: note = Synthetic construct
  source 1..108: mol_type = other DNA
attcggccctcaggggtccctgaccgattctcaggctccaagtctggcacctcagcctccctggccatcagtgggctccaggctgaggatgaggctgattattactgc

SEQ ID NO: 10171 - DNA, 108 bp, synthetic construct
  misc_feature 1..108: note = Synthetic construct
  source 1..108: mol_type = other DNA
aagcggccctctggggtccctgatcgcttctctggctccaagtctggcaacacggcctccctgaccgtctctgggctccaggctgaggatgaggctgattattattgc

SEQ ID NO: 10172 - DNA, 108 bp, synthetic construct
  misc_feature 1..108: note = Synthetic construct
  source 1..108: mol_type = other DNA
gtccgggaatccggggtccctgaccgattcagtggcgccgggtctgggacagatttcaccctcactatcagcagcctgcaggctgaagatgtggcagtttattactgt

SEQ ID NO: 10173 - DNA, 108 bp, synthetic construct
  misc_feature 1..108: note = Synthetic construct
  source 1..108: mol_type = other DNA
aagcggccctcagggatcccagaccgattctctgcctccaggtcaggagacacagcttccttgaccatcagtggggctcaggcggaagatgaggctgactattactgt

SEQ ID NO: 10174 - DNA, 114 bp, synthetic construct
  misc_feature 1..114: note = Synthetic construct
  source 1..114: mol_type = other DNA
caaagaccctctggggtccctgctcggttctctggctccatcgacaggtcctccaactctgcctccctcatcatctctggtctgagcactgaggacgaggctgactactattgt

SEQ ID NO: 10175 - DNA, 108 bp, synthetic construct
  misc_feature 1..108: note = Synthetic construct
  source 1..108: mol_type = other DNA
acccgggaatccggggtccctgaccgcttcagtggcagcgggtctgagacggatttcactctcaccatcagcagcctgcagcctgaggatgtggcaatttatttctgt

SEQ ID NO: 10176 - DNA, 108 bp, synthetic construct
  misc_feature 1..108: note = Synthetic construct
  source 1..108: mol_type = other DNA
cagtccatttcaggggtcccctcgaggttcagtggcagtggatccgggacagatttcaccctcaccatcaatggcctggaacctgaagatgctgcaacgtattactgc

SEQ ID NO: 10177 - DNA, 108 bp, synthetic construct
  misc_feature 1..108: note = Synthetic construct
  source 1..108: mol_type = other DNA
acaagggccgctggcatcgcagacaggttcagtggcagtggctctgggacagacttcactctcaccatcagcagactggagcctgaagattttgcagtgtattactgt

SEQ ID NO: 10178 - DNA, 108 bp, synthetic construct
  misc_feature 1..108: note = Synthetic construct
  source 1..108: mol_type = other DNA
accagggccactggcatcccagacaggttcagtggcagtgggtctgggacagacttcactctcaccattaacagactggagcctgaagattctgcagtatattactgt

SEQ ID NO: 10179 - DNA, 108 bp, synthetic construct
  misc_feature 1..108: note = Synthetic construct
  source 1..108: mol_type = other DNA
agcagggccactggcttcccagacaggttcagtggcagtgggtctgggacagacttcactctcaccatcagcagactggagcctgaagattttgcagtgtatttctgt

SEQ ID NO: 10180 - DNA, 108 bp, synthetic construct
  misc_feature 1..108: note = Synthetic construct
  source 1..108: mol_type = other DNA
agcagggccgctggcatcccagacaggttcagtggcagtggctctgggacagacttcactctcaccatcaccagactggagcctgacgattttgcaatgtattactgt

SEQ ID NO: 10181 - DNA, 108 bp, synthetic construct
  misc_feature 1..108: note = Synthetic construct
  source 1..108: mol_type = other DNA
gaccggccctcagggatccccgagcgattctcaggctccaactctgggaacacggccaccttgaccatcaccacggtcgaggtcggggatgaggccgactattattgt

SEQ ID NO: 10182 - DNA, 108 bp, synthetic construct
  misc_feature 1..108: note = Synthetic construct
  source 1..108: mol_type = other DNA
cagcggccctcaggggtccctgaccgattctctggctccaagtctggcacctcagcctccctggccatcagtgggctccagtctgaggatgaggctgattattactgt

SEQ ID NO: 10183 - DNA, 108 bp, synthetic construct
  misc_feature 1..108: note = Synthetic construct
  source 1..108: mol_type = other DNA
agtttgcaaagtggggtcccttcacggttcagtggcagtgggtctgggacagatttcactctcaccatcagcagactgcaatctgaggattttgcaacttacttctgt

SEQ ID NO: 10184 - DNA, 108 bp, synthetic construct
  misc_feature 1..108: note = Synthetic construct
  source 1..108: mol_type = other DNA
aagcggccctcaggggtttctaatcgcttctctggctccaagtctggcaacacggcctccctgacaatctctgggctccaggctgaggacgaggctgattgtcactgc

SEQ ID NO: 10185 - DNA, 108 bp, synthetic construct
  misc_feature 1..108: note = Synthetic construct
  source 1..108: mol_type = other DNA
agccgggtctctggagtgccagataggttcagtggcaccgggtcagggacagatttcacactgaaaatcagccgggtggaggctgaggatgttgggatttattactgc

SEQ ID NO: 10186 - DNA, 108 bp, synthetic construct
  misc_feature 1..108: note = Synthetic construct
  source 1..108: mol_type = other DNA
actttgcaaagtggggtcccatcaaggttcagcggcagtggatctgggacagatttcactctcaccatcagcagcctgcagcctgaagattttgcaacttattattgt

SEQ ID NO: 10187 - DNA, 27 bp, synthetic construct
  misc_feature 1..27: note = Synthetic construct
  source 1..27: mol_type = other DNA
gcagaagacgaggctgactattactgt

SEQ ID NO: 10188 - DNA, 108 bp, synthetic construct
  misc_feature 1..108: note = Synthetic construct
  source 1..108: mol_type = other DNA
actttgcaaagtggggtcccatcaaggttcagtggcagtggatctgggacagatttcactctcaccatcagctgcctgcagtctgaagattttgcaacttattactgt

SEQ ID NO: 10189 - DNA, 108 bp, synthetic construct
  misc_feature 1..108: note = Synthetic construct
  source 1..108: mol_type = other DNA
gtgaggccctcagggatccctgagcgattctctgcctccaagtcaggggcaacggtcacgttgaccatcaggggagtccaggcagaagacgagggtgactattattgt

SEQ ID NO: 10190 - DNA, 108 bp, synthetic construct
  misc_feature 1..108: note = Synthetic construct
  source 1..108: mol_type = other DNA
cagcggccctcaggggtccctgaccgattctctggctccaagtctggcacctcagcctccctggccatcagtgggctccggtccgaggatgaggctgattattactgt

SEQ ID NO: 10191 - DNA, 108 bp, synthetic construct
  misc_feature 1..108: note = Synthetic construct
  source 1..108: mol_type = other DNA
agtttagaaagtggggtcccgtcaaggttcagcggcagtggatctgggacagagttcactctcaccatcaacagcctgcagcctgatgattttgcaacttattactgc

SEQ ID NO: 10192 - DNA, 108 bp, synthetic construct
  misc_feature 1..108: note = Synthetic construct
  source 1..108: mol_type = other DNA
gaacggccctctggggtttctaatcgcttctctggctccaagtctggcgacacggcctccctgacaatctctggtctccagactgacgacgaggcggattattattgc

SEQ ID NO: 10193 - DNA, 108 bp, synthetic construct
  misc_feature 1..108: note = Synthetic construct
  source 1..108: mol_type = other DNA
agtttgcaaagtgaggtcccgtcaaggttcagcggcagtggatctgggacagatttcactctcaccatcaacagcctgcagcctgaagattttgcaacttactattgt

SEQ ID NO: 10194 - DNA, 108 bp, synthetic construct
  misc_feature 1..108: note = Synthetic construct
  source 1..108: mol_type = other DNA
tccaagggggatggcatccctgatcgcttctcagtcttgggctcaggcctgaatcggtacctgaccatcaagaacatccaagaggaggatgaaggtgactatcactgt

SEQ ID NO: 10195 - DNA, 108 bp, synthetic construct
  misc_feature 1..108: note = Synthetic construct
  source 1..108: mol_type = other DNA
actttgcagagtggggtcccatcaaggttcagcggcagtggatctgggacagaattcactctcacaatcagcagcctgcagcctgaagattttgcaacgtattactgt

SEQ ID NO: 10196 - DNA, 108 bp, synthetic construct
  misc_feature 1..108: note = Synthetic construct
  source 1..108: mol_type = other DNA
agcagggccactggcatcccagacaggttcagtggcagtgggtctgggacagacttcattctcaccatcagcagactggagcctgaagattttgcagtgtattgctgt

SEQ ID NO: 10197 - DNA, 108 bp, synthetic construct
  misc_feature 1..108: note = Synthetic construct
  source 1..108: mol_type = other DNA
acccgggaatccggggtccctgaccgattcagtggcagcgggtctgggacagatttcactctcaccatcagcagcctgcaggctgaagatgtggcagtttattactgt

SEQ ID NO: 10198 - DNA, 108 bp, synthetic construct
  misc_feature 1..108: note = Synthetic construct
  source 1..108: mol_type = other DNA
aaccgggactctggggtcccagacagattcagcggcagtgggtcaggcactgatttcacactgacaatcagcagggtggaggctgaggatgttggcgtttattactgc

SEQ ID NO: 10199 - DNA, 108 bp, synthetic construct; identical to SEQ ID NO: 1856
  misc_feature 1..108: note = Synthetic construct
  source 1..108: mol_type = other DNA

SEQ ID NO: 10200 - DNA, 108 bp, synthetic construct
  misc_feature 1..108: note = Synthetic construct
  source 1..108: mol_type = other DNA
catcggccctcaggggtccctgatcgcttctctggctccaagtctggcaccacggcctccctgaccatctctgggctccaggctgcggacgaggctgattactattgc

SEQ ID NO: 10201 - DNA, 108 bp, synthetic construct
  misc_feature 1..108: note = Synthetic construct
  source 1..108: mol_type = other DNA
agtcggccctcaggggtccctgaccgattctctggctccaagtctggcaacacggcctccctgaccatctctgggctccaggctgacgacgaggctgattattactgc

SEQ ID NO: 10202 - DNA, 108 bp, synthetic construct
  misc_feature 1..108: note = Synthetic construct
  source 1..108: mol_type = other DNA
aagcggccctcaggggtttctaatcgcttctctggctccaagtctggcaacacggcctccctgacaatctctgggctccgggctgaggacgaggctgattattcctgc

SEQ ID NO: 10203 - DNA, 108 bp, synthetic construct
  misc_feature 1..108: note = Synthetic construct
  source 1..108: mol_type = other DNA
gaccggccctcagggatccctgagcgattctctggctccaactctgggagcacggccaccctgaccatcagcagggtcgaagccggggatgaggccgactattactgt

SEQ ID NO: 10204 - DNA, 108 bp, synthetic construct
  misc_feature 1..108: note = Synthetic construct
  source 1..108: mol_type = other DNA
agtagggccactggcatcccggccaggttcagtggcagtgggtctgggacagacttcactctcaccatcagcagcctggagcctgaagattttgcaatttattactgt

SEQ ID NO: 10205 - DNA, 108 bp, synthetic construct
  misc_feature 1..108: note = Synthetic construct
  source 1..108: mol_type = other DNA
aaccgggactatggggtcccagacagattcagcggcagtgggtcagacactgatttcacactgagaatcagcagggtggaggctgaggatgttggactttattactgc

SEQ ID NO: 10206 - DNA, 108 bp, synthetic construct
  misc_feature 1..108: note = Synthetic construct
  source 1..108: mol_type = other DNA
acgagggccactggtaccacagccaggttcagtggcagtgggtctgggacagagttcactctcaccatcagcagcctgcagtctgaagattttgcagtttattactgt

SEQ ID NO: 10207 - DNA, 108 bp, synthetic construct
  misc_feature 1..108: note = Synthetic construct
  source 1..108: mol_type = other DNA
catcaggatgacgagttgtctgatcgcttctcaggctccttctctggggctgaccgctacctcaccatctccagcctccagcctgaggatgaggctgactattactgt

SEQ ID NO: 10208 - DNA, 108 bp, synthetic construct
  misc_feature 1..108: note = Synthetic construct
  source 1..108: mol_type = other DNA
aatcggccctcaggggtccctgaccgattctctggctccaagtctggcacctcagttttcctggccatcactgggctccaggctgaggatgaggctgattattactgc

SEQ ID NO: 10209 - DNA, 108 bp, synthetic construct
  misc_feature 1..108: note = Synthetic construct
  source 1..108: mol_type = other DNA
accagggccactggcatcccagacaggttcagtggcagtgggtctggggcagacttcactctcaccatcagcagtctgcagcctgaggattttgcagtctattactgt

SEQ ID NO: 10210 - DNA, 108 bp, synthetic construct
  misc_feature 1..108: note = Synthetic construct
  source 1..108: mol_type = other DNA
aagagggccactggcatcccagccaggttcagtggcagtgggtctgggacagacttcactctcaccatcagcagcctagaacctgaggattttgcagtttattactgt

SEQ ID NO: 10211 - DNA, 108 bp, synthetic construct
  misc_feature 1..108: note = Synthetic construct
  source 1..108: mol_type = other DNA
aacagggccgatggcatcccagacaggttcagtggcagtgggtctgggacagagtacactctcaccatcaccaggctggagcctgaagatgttgcggtatattattgt

SEQ ID NO: 10212 - DNA, 108 bp, synthetic construct
  misc_feature 1..108: note = Synthetic construct
  source 1..108: mol_type = other DNA
aaccgggactctggggtcccagacagattcagcggcagtgggtcagccactgattttacactgagaatcagcagcgtggaggctgaggatgttgggatttattactgc

SEQ ID NO: 10213 - DNA, 108 bp, synthetic construct
  misc_feature 1..108: note = Synthetic construct
  source 1..108: mol_type = other DNA
aatgggccctcagggatttctaatcgcttctctggctccaagtctggcaacacggcctccctgaccatctctgggctccaggctgacgacgaggctgattattactgc

SEQ ID NO: 10214 - DNA, 108 bp, synthetic construct
  misc_feature 1..108: note = Synthetic construct
  source 1..108: mol_type = other DNA
aagcggccctcaggggtttctaatcgcttctctggctccaagtctggcaacacggcctccctgacaatctctgggctccaggctgaggacgaggttgattattactgc

SEQ ID NO: 10215 - DNA, 108 bp, synthetic construct
  misc_feature 1..108: note = Synthetic construct
  source 1..108: mol_type = other DNA
acacgggaatccggggtccctgaccgattcattggcagcgggtctgggacagatttcactctcaccatcaccagcctgcaggctgaagatgtggcagtttattactgt

SEQ ID NO: 10216 - DNA, 108 bp, synthetic construct
  misc_feature 1..108: note = Synthetic construct
  source 1..108: mol_type = other DNA
aacagggtcactggcatcccagccaggttcagtggcagtgggtctgggacagacttcactctcaccatcagcagcctagagcctgaagattttgcagtttattactgt

SEQ ID NO: 10217 - DNA, 108 bp, synthetic construct
  misc_feature 1..108: note = Synthetic construct
  source 1..108: mol_type = other DNA
aacaaacactcctggacacctgcccggttctcaggctccctccttgggggcaaagctgccctgaccctttcgggtgcgcagcctgaggatgaggctgagtattactgc

SEQ ID NO: 10218 - DNA, 108 bp, synthetic construct
  misc_feature 1..108: note = Synthetic construct
  source 1..108: mol_type = other DNA
agtttgcaaagtggggtcccatcaaggttcagcggcagtggatctgggacagaattcactctcacaatcagcagcctgcagcctgaagattttgcaatttattactgt

SEQ ID NO: 10219 - DNA, 108 bp, synthetic construct
  misc_feature 1..108: note = Synthetic construct
  source 1..108: mol_type = other DNA
accagggcccctggtgtcccagccaggttcagtggcggtgggtctgggacagacttcactctcaccatcagcagcctggagtctgaagattttgcagtttattactgt

SEQ ID NO: 10220 - DNA, 108 bp, synthetic construct
  misc_feature 1..108: note = Synthetic construct
  source 1..108: mol_type = other DNA
aaccgggactctggggtcccagacagattcagtggcagtgggtcaggcactgacttcacactgaaaatcagcagggtggaggctgaggatgttggagtttattactgc

SEQ ID NO: 10221 - DNA, 108 bp, synthetic construct
  misc_feature 1..108: note = Synthetic construct
  source 1..108: mol_type = other DNA
aaccgggactctggggtcccagacagattcagcggcagtgggtcaggcactgatttcacactgaaaatcagcagggtggaggctgaggatgttggggtttattactgc

SEQ ID NO: 10222 - DNA, 108 bp, synthetic construct
  misc_feature 1..108: note = Synthetic construct
  source 1..108: mol_type = other DNA
agtttgaaagcaggggtcccatcaagattcagtggaagtggctctggaaaaaagtttactttcaccatcaataacctgcagcctgaagatattgcaacatattactgt

SEQ ID NO: 10223 - DNA, 108 bp, synthetic construct
  misc_feature 1..108: note = Synthetic construct
  source 1..108: mol_type = other DNA
aatttggaagcaggggtcccatctaggttcagtggcggtggatctgggacagattttactctcaccatcaacagcctacagcctgaagatattgcaacatattactgt

SEQ ID NO: 10224 - DNA, 108 bp, synthetic construct
  misc_feature 1..108: note = Synthetic construct
  source 1..108: mol_type = other DNA
agattggaaagtggggtcccatttcggttcagtggcagtggatctgggacggctttcactctcagcatcagcagcctgcagcctgaagattttgcaacttattactgt

SEQ ID NO: 10225 - DNA, 108 bp, synthetic construct
  misc_feature 1..108: note = Synthetic construct
  source 1..108: mol_type = other DNA
aacagggccagtggcatcccagccaggttcagtggcagtgggtctgggacagacttcattctcaccatcaccagcctagagcctgaagattttgctgtttattactgt

SEQ ID NO: 10226 - DNA, 108 bp, synthetic construct
  misc_feature 1..108: note = Synthetic construct
  source 1..108: mol_type = other DNA
agtttacaaagtggtgtcccctcaagattcactggcagtggatctgggacagatttcactctcaccatcaacagtctgcaacctgaagattttgcaacctacttctgt

SEQ ID NO: 10227 - DNA, 108 bp, synthetic construct
  misc_feature 1..108: note = Synthetic construct
  source 1..108: mol_type = other DNA
catttacacagtggggtcccatcaagattcggtggcggtggatctgggacagagttcaccctcaccatcggcagtctacaacctgaagattttgcaacttactactgt

SEQ ID NO: 10228 - DNA, 108 bp, synthetic construct
  misc_feature 1..108: note = Synthetic construct
  source 1..108: mol_type = other DNA
agtttgcaaagtggggtcccatcaaggttcagtggcagtggatctgggacagatttcactctcaccatcagcagtctgcaacctgaagattttgcaacttactactgt

SEQ ID NO: 10229 - DNA, 108 bp, synthetic construct
  misc_feature 1..108: note = Synthetic construct
  source 1..108: mol_type = other DNA
agattagaaaccggggtcccatcaaggttcagtggcagtgcatctggggcagacttcactctcaccatcagcagtctgcaacctgaagattttgcaacttacttctgt

SEQ ID NO: 10230 - DNA, 108 bp, synthetic construct
  misc_feature 1..108: note = Synthetic construct
  source 1..108: mol_type = other DNA
aatttagagacaggggtctcatcaaggttcagtggaagtggatctgggacagatttcactctcaccatcaacagcctgcagcctgaagatattgcaacatatttctgt

SEQ ID NO: 10231 - DNA, 108 bp, synthetic construct
  misc_feature 1..108: note = Synthetic construct
  source 1..108: mol_type = other DNA
accagggccactggcatcccagacaggttcattggcagtgggtctgggacagacttcactctcaccatcaacagactggagcctgaagattttgcagtgtattactgt

SEQ ID NO: 10232 - DNA, 108 bp, synthetic construct
  misc_feature 1..108: note = Synthetic construct
  source 1..108: mol_type = other DNA
agcagggccactggcatcccagacaggttcagtggcagtgggtctgggacagacttcactctgaccatcagcagactggagcctgaagattttgcaatatattactgt

SEQ ID NO: 10233 - DNA, 108 bp, synthetic construct
  misc_feature 1..108: note = Synthetic construct
  source 1..108: mol_type = other DNA
agcagggccactggcatcccagacaggttcagtggcagtgggtctgggacagacttcactctcaccatcagcagactggagcctgaagattttgcagtatattactgt

SEQ ID NO: 10234 - DNA, 108 bp, synthetic construct
  misc_feature 1..108: note = Synthetic construct
  source 1..108: mol_type = other DNA
aatctggaaacaggcgtgccttctaggttctccggctctgggagtggaactgacttcacctttacaatctctagtctgcagccagaggatattgctacatatttctgt

SEQ ID NO: 10235 - DNA, 108 bp, synthetic construct
  misc_feature 1..108: note = Synthetic construct
  source 1..108: mol_type = other DNA
aatttagaaagtggggtcccattaaggttcagcggcagtggatctgggacagaattcactctcaccatcagcagcctgcagcctgatgattttgcagtttattactgc

SEQ ID NO: 10236 - DNA, 108 bp, synthetic construct
  misc_feature 1..108: note = Synthetic construct
  source 1..108: mol_type = other DNA
accagggtcactggtatcccagccaggttcagtggcagtgggtctgggacagagttcactctcaccatcagcagcctgcagtttgaggattttgcagtttattactgt

SEQ ID NO: 10237 - DNA, 108 bp, synthetic construct
  misc_feature 1..108: note = Synthetic construct
  source 1..108: mol_type = other DNA
accagggccactggtatcccagccaggttcagtggcagtggatctgggacaaatttcactctcaccatcagcagcctgcagtctgaagattttgcagtttattactgt

SEQ ID NO: 10238 - DNA, 108 bp, synthetic construct
  misc_feature 1..108: note = Synthetic construct
  source 1..108: mol_type = other DNA
accagggccactggtatcccagccaggttcagtggcagtgggtctgggacagagttcactctcaccatcagcagcctgcagtctgaagattttgcagtttattactgt

SEQ ID NO: 10239 - DNA, 108 bp, synthetic construct
  misc_feature 1..108: note = Synthetic construct
  source 1..108: mol_type = other DNA
accagggccactgttatcccagccaggttcagtggcagtgggtctgggacagagttcactctcaccatcagcagcctgcaatctgaagattttgcagtttattactgt

SEQ ID NO: 10240 - DNA, 108 bp, synthetic construct
  misc_feature 1..108: note = Synthetic construct
  source 1..108: mol_type = other DNA
agtttagaaagtggggtcccatcaaggttcagcggcagtggatctgggacagaattcactctcaccatcagcagcctgcagcctgatgattttgcaacttattactgc

SEQ ID NO: 10241 - DNA, 108 bp, synthetic construct
  misc_feature 1..108: note = Synthetic construct
  source 1..108: mol_type = other DNA
tccagggccaccggtatcccagccaggttcagtggcagtgggtctgggacagacttcactctcaccatcagcagcctgcagtctgaagattttgcagtttattactgt

SEQ ID NO: 10242 - DNA, 108 bp, synthetic construct
  misc_feature 1..108: note = Synthetic construct
  source 1..108: mol_type = other DNA
agcagggccaccggcgtcccagacaggttcagtggcagtgggtctgggacagacttcactctcaccatcagcagactggagcctgaagattctgcagtgtattactgt

SEQ ID NO: 10243 - DNA, 108 bp, synthetic construct
  misc_feature 1..108: note = Synthetic construct
  source 1..108: mol_type = other DNA
agcagggccactggcatcccagacaggttcagtggcagtgggtctgggacagacttcactctcaccatcagcagactggagcctgaagattttgcagtgtattactgt

SEQ ID NO: 10244 - DNA, 108 bp, synthetic construct
  misc_feature 1..108: note = Synthetic construct
  source 1..108: mol_type = other DNA
acccgggaatctggggtccctgaccgattcagtggcagcgggtctgcgacagatttcactctcaccatcagcagcctgcaggctgaagatgtggcaatttattactgt

SEQ ID NO: 10245 - DNA, 108 bp, synthetic construct
  misc_feature 1..108: note = Synthetic construct
  source 1..108: mol_type = other DNA
actttgcaaagtggggtcccatcaaggttcagtggcagtggatctgggacagatttcactctcaccatcagttgcctgcagtctgaagattttgcaacttattactgt

SEQ ID NO: 10246 - DNA, 108 bp, synthetic construct
  misc_feature 1..108: note = Synthetic construct
  source 1..108: mol_type = other DNA
actttgcaaagtggggtcccatcaaggttcagcggcagtggatctgggacagatttcactctcaccatcagctgcctgcagtctgaagattttgcaacttattactgt

SEQ ID NO: 10247 - DNA, 108 bp, synthetic construct
  misc_feature 1..108: note = Synthetic construct
  source 1..108: mol_type = other DNA
agccgggaatccggggtccctgaccgattcagtggcagcgggtctgggacagatttcactctcaccatcagcagcctgcaggctgaagatgtggcagtttattactgt

SEQ ID NO: 10248 - DNA, 108 bp, synthetic construct
  misc_feature 1..108: note = Synthetic construct
  source 1..108: mol_type = other DNA
gagaggccctcagggatccctgagcgattctctggctccagctcagggacaacagtcacgttgaccatcagtggagtccgggcagaagacgaggctgactattattgt

SEQ ID NO: 10249 - DNA, 108 bp, synthetic construct
  misc_feature 1..108: note = Synthetic construct
  source 1..108: mol_type = other DNA
aatcggccctcagggatcccagaccgattctctggctccaggtcaggaaacacagcttccttgaccatcactggggctcgggcggaagatgaggctgactattactgt

SEQ ID NO: 10250 - DNA, 108 bp, synthetic construct
  misc_feature 1..108: note = Synthetic construct
  source 1..108: mol_type = other DNA
gagaggccctcagggatccctgagcgattctctggctccagctcagggacaacagtcacgttgaccatcagtggagtccaggcagaagacgaggctgactattactgt

SEQ ID NO: 10251 - DNA, 108 bp, synthetic construct
  misc_feature 1..108: note = Synthetic construct
  source 1..108: mol_type = other DNA
gcccggccctcagggatccctgagcgattctctggatccaattctgggaacacggccaccctgaccatcagcagggtcgaaggcggggatgaggccgactattactgt

SEQ ID NO: 10252 - DNA, 108 bp, synthetic construct
  misc_feature 1..108: note = Synthetic construct
  source 1..108: mol_type = other DNA
aatcggccctcagggatttctaatcggttctctggctccaagtctggcaacacggcctccctgaccatctctgggctccaggctgacgacgaggctgattattactgc

SEQ ID NO: 10253 - DNA, 108 bp, synthetic construct
  misc_feature 1..108: note = Synthetic construct
  source 1..108: mol_type = other DNA
aatcggccctcagggatttctaatcgcttctctggctccaagtctggcaacacggcctccctgaccatctctgggctccaggctgacgacgagggtgattattactgc

SEQ ID NO: 10254 - DNA, 108 bp, synthetic construct
  misc_feature 1..108: note = Synthetic construct
  source 1..108: mol_type = other DNA
aatcggccctcagggatttctaatcgcttctctggctccaagtctgacaacacggcctccctgaccatctctgggctccaggctgacgacgaggctgattattactgc

SEQ ID NO: 10255 - DNA, 108 bp, synthetic construct
  misc_feature 1..108: note = Synthetic construct
  source 1..108: mol_type = other DNA
aatcggccctcagggatttctaatcgcttctctggctccaagtctggcaacacggcctccctgaccatctctgggctccaggctgacgacgacactgattattactgc

SEQ ID NO: 10256 - DNA, 108 bp, synthetic construct
  misc_feature 1..108: note = Synthetic construct
  source 1..108: mol_type = other DNA
aatcggccctcagggatttctaatcgcttctctggctccaagtctgacaagacggcctccctgaccatctctgggctccaggctgacgacgaggctgattattactgc

SEQ ID NO: 10257 - DNA, 108 bp, synthetic construct
  misc_feature 1..108: note = Synthetic construct
  source 1..108: mol_type = other DNA
aatcggccctcagggatttctaatcgcttctctggatccaagtctggcaacacggcctccctgaccatctctgggctccaggctgacgacgaggctgattattactgc

SEQ ID NO: 10258 - DNA, 108 bp, synthetic construct
  misc_feature 1..108: note = Synthetic construct
  source 1..108: mol_type = other DNA
actttggcaacaggcgccccatcaaggttcagtggaagtggatctgggacacattttactctcaccatcagcagactgcagcctgatgatattgcaacatactactgt

SEQ ID NO: 10259 - DNA, 108 bp, synthetic construct
  misc_feature 1..108: note = Synthetic construct
  source 1..108: mol_type = other DNA
agcagggccgctggcatcccagagaggttccgtggcggcgggtctgggacagacttcactctcaccatcagcagactggagcctgaagattttgcagtctattactgt

SEQ ID NO: 10260 - DNA, 108 bp, synthetic construct
  misc_feature 1..108: note = Synthetic construct
  source 1..108: mol_type = other DNA
tcccgggaatccggggtccctgaccgatttagtggcagcggatctgggacagatttcactctcaccatcagcagcctgcaggctgaagatgtggcactttattattgt

SEQ ID NO: 10261 - DNA, 108 bp, synthetic construct
  misc_feature 1..108: note = Synthetic construct
  source 1..108: mol_type = other DNA
aacagggccactggcatccccgacaggttcactggcagtgggtctgggacagacttcactctcaccatcagcagactggagcctgacgattttgcagtgtattactgt

SEQ ID NO: 10262 - DNA, 108 bp, synthetic construct
  misc_feature 1..108: note = Synthetic construct
  source 1..108: mol_type = other DNA
agtagggccactggcatcccagacaggttcagtggcagtgggtctgggacagacttcactctcaccatcagcagactggagcctgacgattttgcagtgtattattgt

SEQ ID NO: 10263 - DNA, 108 bp, synthetic construct
  misc_feature 1..108: note = Synthetic construct
  source 1..108: mol_type = other DNA
aacagggccactggcatcccagccaggttcagtggcagtgggtctgggacagacttcactctcaccatcagcagcctagagcctgaagattttgcagtttattactgt

SEQ ID NO: 10264 - DNA, 108 bp, synthetic construct
  misc_feature 1..108: note = Synthetic construct
  source 1..108: mol_type = other DNA
aaccggccctcagggatcccagaccgattctctggctccagctcaggaaacacagcttccttgaccatcactggggctcaggcggaagatgaggctgactattactgt

SEQ ID NO: 10265 - DNA, 108 bp, synthetic construct
  misc_feature 1..108: note = Synthetic construct
  source 1..108: mol_type = other DNA
gaccggccctcagggatccctgagcgattctctggctccaactctgggaacacggccaccctgaccatcagcagggtcgaagccggggatgaggccgactattattgt

SEQ ID NO: 10266 - DNA, 108 bp, synthetic construct
  misc_feature 1..108: note = Synthetic construct
  source 1..108: mol_type = other DNA
accagggccactggtatcccagccaggttcagtggcagtgggtctgggacagagttcactctcaccatcagtagcctgcagtctgaagattttgcagtttattactgt

SEQ ID NO: 10267 - DNA, 108 bp, synthetic construct
  misc_feature 1..108: note = Synthetic construct
  source 1..108: mol_type = other DNA
cagcggccctcaggggtccctgaccgcttctctggctccaagtctggcacctcagcctccctggccatcagtgggctccggtccgaggatgaggctatttattactgt

SEQ ID NO: 10268 - DNA, 108 bp, synthetic construct
  misc_feature 1..108: note = Synthetic construct
  source 1..108: mol_type = other DNA
tatcgggcctctggagtcccagacaggttcagtggcagtgggtcaggcactgatttcacactgaaaatcagcagggtggaggctgaggatgttggagtttattactgc

SEQ ID NO: 10269 - DNA, 108 bp, synthetic construct
  misc_feature 1..108: note = Synthetic construct
  source 1..108: mol_type = other DNA
aagcggccctcaggggtccctgatcgcttctctggctccaagtctggcaacacggcctccctgaccatctctgggctccaggctgaggatgaggctgattattactgc

SEQ ID NO: 10270 - DNA, 108 bp, synthetic construct
  misc_feature 1..108: note = Synthetic construct
  source 1..108: mol_type = other DNA
catttacaaagtggggtcccatcaaggtttagcggcagtggatctggcacagatttcactctcaccatcagcatcctgcggcctgaagattttgcaacgtattactgt

SEQ ID NO: 10271 - DNA, 29 bp, synthetic construct
  misc_feature 1..29: note = Synthetic construct
  source 1..29: mol_type = other DNA
aggctgacgacgaggctgattttcagtgc

SEQ ID NO: 10272 - DNA, 108 bp, synthetic construct
  misc_feature 1..108: note = Synthetic construct
  source 1..108: mol_type = other DNA
gcgaggccctcaggcatccctgcccgattctctggctccggctcagggacaacagctacattgaccatcagtggagtccaggcagaagacgaggctgattattactgt

SEQ ID NO: 10273 - DNA, 108 bp, synthetic construct
  misc_feature 1..108: note = Synthetic construct
  source 1..108: mol_type = other DNA
aagcggccctcaggggtccctgatcgcttctctggctccaagtctggcaacacggcctccctgaccgtctctgggctccaggctgaggatgaggctgattattactgc

SEQ ID NO: 10274 - DNA, 40 bp, synthetic construct
  misc_feature 1..40: note = Synthetic construct
  source 1..40: mol_type = other DNA
caccgacctccaaactggggacgaggccgactattactgc

SEQ ID NO: 10275 - DNA, 114 bp, synthetic construct
  misc_feature 1..114: note = Synthetic construct
  source 1..114: mol_type = other DNA
caaaggccctctggggtccccgatcgcttctctgcctccgtcgacggctcctccaactctgcctccctcaccatctctggactgcagactgaggacgaggctgactactactgt

SEQ ID NO: 10276 - DNA, 108 bp, synthetic construct
  misc_feature 1..108: note = Synthetic construct
  source 1..108: mol_type = other DNA
agattggaaagtggggtcccatccaggttcagtggcagtggatctgggacggattacactctcaccatcagcagcctgcagcctgaagattttgcaacttattactgt

SEQ ID NO: 10277 - DNA, 108 bp, synthetic construct
  misc_feature 1..108: note = Synthetic construct
  source 1..108: mol_type = other DNA
tttttgaaaagtggagtcccatcaaggttcagcggcagtggatctgggacagaattcactctcacaatcaacagcctgcagcctgaagattttgcaacttatttctgt

SEQ ID NO: 10278 - DNA, 108 bp, synthetic construct
  misc_feature 1..108: note = Synthetic construct
  source 1..108: mol_type = other DNA
agtttagaaagtggggtcccatcaaggttcagcggcagtggatctgggacagaattcactctcaccatcagcagcctgcagcctgatgactttgcaacttattactgc

SEQ ID NO: 10279 - DNA, 108 bp, synthetic construct
  misc_feature 1..108: note = Synthetic construct
  source 1..108: mol_type = other DNA
aatcggccctcaggggtccctgaccgattctctggctccaagtctggcacctcagcctccctggccatcactgggctccaggctgaggatgaggctgattattactgc

SEQ ID NO: 10280 - DNA, 108 bp, synthetic construct
  misc_feature 1..108: note = Synthetic construct
  source 1..108: mol_type = other DNA
acgcgggaagccggggtccctgaccgattcagtggcagcgggtctgggacagatttcactctcaccatcagcagcctgcaggctgaagatgtggcagtttattactgt

SEQ ID NO: 10281 - DNA, 108 bp, synthetic construct
  misc_feature 1..108: note = Synthetic construct
  source 1..108: mol_type = other DNA
aacagggccactggcatcccagacaggttcagtggcagtgggtctgggacagacttcagtctcaccatcagccgactggagccggaagattttgcaatgtattactgt

SEQ ID NO: 10282 - DNA, 108 bp, synthetic construct
  misc_feature 1..108: note = Synthetic construct
  source 1..108: mol_type = other DNA
aagcggccctcaggggtttctaatcgcttctctggctccaagtctggcaacacggcctccctgaccatctctgggctccaggctgacgacgaggctgattattactgc

SEQ ID NO: 10283 - DNA, 108 bp, synthetic construct
  misc_feature 1..108: note = Synthetic construct
  source 1..108: mol_type = other DNA
agtttgcaaaatggcgtcccatcgaggttcagaggcagtggatctgagacagagttcactctcaccatcagcaacctgcagcctgatgattctgcaacttattactgc

SEQ ID NO: 10284 - DNA, 108 bp, synthetic construct
  misc_feature 1..108: note = Synthetic construct
  source 1..108: mol_type = other DNA
gagcggccctcagggatccctgagcgattctccggctccagctcagggaccacagtcaccttgaccatcagcggggcccaggttgaggatgaggctgactattactgt

SEQ ID NO: 10285 - DNA, 108 bp, synthetic construct
  misc_feature 1..108: note = Synthetic construct
  source 1..108: mol_type = other DNA
gaccggccctcagggatccctgaacgtttctccggctccaattctgagactatggccaccctgaccatcgactgggtcgaggccggggatgaggccgactatttctgt

SEQ ID NO: 10286 - DNA, 108 bp, synthetic construct
  misc_feature 1..108: note = Synthetic construct
  source 1..108: mol_type = other DNA
agcagggccactggcatcccagacaggttcagtggcagtgggtctgggacagacttcacgctcaccatcagcagactggagcctgaggattttgcagtgtatttctgt

SEQ ID NO: 10287 - DNA, 108 bp, synthetic construct
  misc_feature 1..108: note = Synthetic construct
  source 1..108: mol_type = other DNA
accagggccactggtgtcccagacaggttcagtggcagtgggtctgggacagagttcactctcaccatcagcagcctgcagtctgaagattttgcagtttattactgt

SEQ ID NO: 10288 - DNA, 108 bp, synthetic construct
  misc_feature 1..108: note = Synthetic construct
  source 1..108: mol_type = other DNA
attctgcaggcaggggtctcatcgcgtttcagcggcagtggatctgggacaaatttcactctctccataagaaacctggagcctgaggatgttggcacttattactgt

SEQ ID NO: 10289 - DNA, 108 bp, synthetic construct
  misc_feature 1..108: note = Synthetic construct
  source 1..108: mol_type = other DNA
agcagggccactggcatcccagacaggttcagtggcagtgggtctgggacagacttcactctcaccatcagcagactggagcctgaagattttgcagtgttttactgt

SEQ ID NO: 10290 - DNA, 108 bp, synthetic construct
  misc_feature 1..108: note = Synthetic construct
  source 1..108: mol_type = other DNA
agtttagaaagtggggtcccatcaaggttcagcggcagcggatctgggacagaattcactctcaccatcagcagcctgcagcctgatgattttgcaacttattactgc

SEQ ID NO: 10291 - DNA, 108 bp, synthetic construct
  misc_feature 1..108: note = Synthetic construct
  source 1..108: mol_type = other DNA
cagcggccctcaggggtccctgaccgaatctctggctccaagtctggcacctcagcctccctggccatcagtggactccagtctgaggatgaggctgattattactgt

SEQ ID NO: 10292 - DNA, 108 bp, synthetic construct
  misc_feature 1..108: note = Synthetic construct
  source 1..108: mol_type = other DNA
gagcggccctcagggatccctgagcgattctccggctccagctcagggaccacagtcaccttgaccatcagccgggcccaggttgaggatgaggctgactattactgt

SEQ ID NO: 10293 - DNA, 108 bp, synthetic construct
  misc_feature 1..108: note = Synthetic construct
  source 1..108: mol_type = other DNA
gagaggccctcagggatccctgagcgattctctggctccaattcagggacaacagtgacgttgaccatcactggagtccaggcagaagacgaggctgactattactgt

SEQ ID NO: 10294 - DNA, 108 bp, synthetic construct
  misc_feature 1..108: note = Synthetic construct
  source 1..108: mol_type = other DNA
aagcggccctcaggggtccctgatcgcttctctggctccaagtctggcaacacggcctccctgaccgtctctggcctccaggctgaagatgagggtgattattactgc

SEQ ID NO: 10295 - DNA, 108 bp, synthetic construct
  misc_feature 1..108: note = Synthetic construct
  source 1..108: mol_type = other DNA
actttagaaaaaggggtcccatcacggttcagcggcagtggatctgggacagaattcactctcaccattagcagtctgcagcctgatgattttgcaacttacttctgt

SEQ ID NO: 10296 - DNA, 108 bp, synthetic construct
  misc_feature 1..108: note = Synthetic construct
  source 1..108: mol_type = other DNA
aatcggccctcaggggtccctgaccgattctctggctccaagtctggcacctcagcctccctgataatcactgggctccagactgaggatgaggctgtttattattgc

SEQ ID NO: 10297 - DNA, 108 bp, synthetic construct
  misc_feature 1..108: note = Synthetic construct
  source 1..108: mol_type = other DNA
actcgggcctccggggtccctgacaggttcattggcactggatcaggcattgattttacactgaaaatcaccagggtgcaacctgaagatgttggggtgtattactgc

SEQ ID NO: 10298 - DNA, 108 bp, synthetic construct
  misc_feature 1..108: note = Synthetic construct
  source 1..108: mol_type = other DNA
aacagggccactggcatcccagacaggttcagaggcagtgggtctgggacagacttcactctcaccatcagcagactggagcctgaagattttgcagtgtattactgt

SEQ ID NO: 10299 - DNA, 114 bp, synthetic construct
  misc_feature 1..114: note = Synthetic construct
  source 1..114: mol_type = other DNA
caaagaccctctggggtccctgatcggttctctggctccatcgacagctcctccaactctgcctccctcaccatctctggactgaagactgaggacgaggctgactactactgt

SEQ ID NO: 10300 - DNA, 108 bp, synthetic construct
  misc_feature 1..108: note = Synthetic construct
  source 1..108: mol_type = other DNA
actttagaaagtggggtcccatcaaggttcagcggcagtggatctgggacagaattcactctcacgatcagcagcctgcagcctgatgattttgcatcttattactgc

SEQ ID NO: 10301 - DNA, 108 bp, synthetic construct
  misc_feature 1..108: note = Synthetic construct
  source 1..108: mol_type = other DNA
aatttagaaagtggggtcccatcaagattcagcggcagtggatctgggacagaattcactctcaccatcagcagcctgcagcctgatgattttgcaacttattactgc

SEQ ID NO: 10302 - DNA, 108 bp, synthetic construct
  misc_feature 1..108: note = Synthetic construct
  source 1..108: mol_type = other DNA
aagcggccctcagggatccctgaccgattctctggctccaactctggaaacacagccactctgaccatcagcgggacccaggctatggatgaggctgactattactgt

SEQ ID NO: 10303 - DNA, 108 bp, synthetic construct
  misc_feature 1..108: note = Synthetic construct
  source 1..108: mol_type = other DNA
accagggccactggtgtcccagcccggttcagtggcactgggtctgggacagagttcttgctcaccatcaccagcctgcagtctgaagatttcgcagtttattattgt

SEQ ID NO: 10304 - DNA, 108 bp, synthetic construct
  misc_feature 1..108: note = Synthetic construct
  source 1..108: mol_type = other DNA
agcagggccgctggcatcccagacaggttcagtggcagtgggtctggggcagacttcgctctcaccatcaccagactggagcctgaagattttggggtgtattactgt

SEQ ID NO: 10305 - DNA, 108 bp, synthetic construct
  misc_feature 1..108: note = Synthetic construct
  source 1..108: mol_type = other DNA
gcccgggagtccggggtccctgcccgatttagtgccagcgcctctgggacagatttcactctcaccatcgacagcctgcaggctgaggatgtggccgtttattactgt

SEQ ID NO: 10306 - DNA, 108 bp, synthetic construct
  misc_feature 1..108: note = Synthetic construct
  source 1..108: mol_type = other DNA
aaccgggactctggggtcccagacagattcagcggcagtggggcaggctctgagttcacgctgacaatcagtagcgtggaggtcgaggatgttggcatttattactgc

SEQ ID NO: 10307 - DNA, 108 bp, synthetic construct
  misc_feature 1..108: note = Synthetic construct
  source 1..108: mol_type = other DNA
actttggagacaggggtcccatcaaggatcagtggaactggatctgggacaacttttactttcaccatcaccagcctgcagcctgaagatattgcaacatattactgt

SEQ ID NO: 10308 - DNA, 108 bp, synthetic construct
  misc_feature 1..108: note = Synthetic construct
  source 1..108: mol_type = other DNA
agcagggcccctggcatcccagagaggttcagtgtcagtgggtctgggacagatttcactctcaccatcagcagtctggagcctgaagattttgcagtgtattactgt

SEQ ID NO: 10309 - DNA, 108 bp, synthetic construct
  misc_feature 1..108: note = Synthetic construct
  source 1..108: mol_type = other DNA
cagcggccctcagatgtctctgaccgattctctggctctaagtctggcaactcagcctccctgaccatcagtggactccggtccgaggatgaggcagactattattgt

SEQ ID NO: 10310 - DNA, 108 bp, synthetic construct
  misc_feature 1..108: note = Synthetic construct
  source 1..108: mol_type = other DNA
actttgcaaagtcatgtcccatctagattcagtggcagtggatccgggacagatttcactttcaccatcagcagtctgcaacctgaagattttgcgacatattactgt

SEQ ID NO: 10311 - DNA, 108 bp, synthetic construct
  misc_feature 1..108: note = Synthetic construct
  source 1..108: mol_type = other DNA
actcgctcttctggggtccctgatcgcttctctggctccatccttggaaacaaagctgccctcaccatcacgggggcccaggcagatgatgaatctgattattactgt

SEQ ID NO: 10312 - DNA, 108 bp, synthetic construct
  misc_feature 1..108: note = Synthetic construct
  source 1..108: mol_type = other DNA
agcagggccactggcatcccagacaggttcagtggcagtgggtctgggacagacttcgctctcaccatcaacagactggagcctgaggattttgcagtgtattactgt

SEQ ID NO: 10313 - DNA, 108 bp, synthetic construct
  misc_feature 1..108: note = Synthetic construct
  source 1..108: mol_type = other DNA
agcagggccactggcatcccagacaggttcagtggcagtgggtctgggacagacttcactctcaccatcagcagactggagcctgaagattttgcagtgtatttctgt

SEQ ID NO: 10314 - DNA, 108 bp, synthetic construct
  misc_feature 1..108: note = Synthetic construct
  source 1..108: mol_type = other DNA
actttaaaaagtggggtcccgtcaaggttcagcggcagtggatctgggacagacttcactctcaccatcagcagcctgcagcctgatgattttgcaacttattactgc

SEQ ID NO: 10315 - DNA, 108 bp, synthetic construct
  misc_feature 1..108: note = Synthetic construct
  source 1..108: mol_type = other DNA
accagggccactggcatcccagacaggttcggtggcagcgggtctgggacagacttcacgctcaccatcagcagactggagcctgaagattttgcagtctatttctgt

SEQ ID NO: 10316 - DNA, 108 bp, synthetic construct
  misc_feature 1..108: note = Synthetic construct
  source 1..108: mol_type = other DNA
cagtccttctcaggggtcccctcgaggttcagtggcagtggatctgggacagatttcaccctcaccatcaatagcttggaagctgaagatgctgcaacgtattactgt

SEQ ID NO: 10317 - DNA, 108 bp, synthetic construct
  misc_feature 1..108: note = Synthetic construct
  source 1..108: mol_type = other DNA
accagggccgctggcatcccagccaggtttagtggcagtgggtctgggacacacttcactctcaccatcagcagcctagagcctgaagattttggagtttattactgt

SEQ ID NO: 10318 - DNA, 108 bp, synthetic construct
  misc_feature 1..108: note = Synthetic construct
  source 1..108: mol_type = other DNA
agtttacaaagtggggtcccatcaaggttcagcggcagtggatctggcacagatttcactctcaccatcagcagcctgcagcctgaagattttgcaacttattactgt

SEQ ID NO: 10319 - DNA, 108 bp, synthetic construct
  misc_feature 1..108: note = Synthetic construct
  source 1..108: mol_type = other DNA
aaccggttctctggggtcccagacagattcagtggcagtggggcagggacagatttcacactgaaaatcagcagggtggaagctgaggatgtcggggtttattactgc

SEQ ID NO: 10320 - DNA, 108 bp, synthetic construct
  misc_feature 1..108: note = Synthetic construct
  source 1..108: mol_type = other DNA
actttacaaagtggggtcccgtcaaggttcagcggcagtgtgtctggcacagatttcactctcaccatcagcagccttcagcctgaagattttgccacttattactgt

SEQ ID NO: 10321 - DNA, 114 bp, synthetic construct
  misc_feature 1..114: note = Synthetic construct
  source 1..114: mol_type = other DNA
caaagaccctctggggtccctgatcggttctctggctccatcgacagctcctccaactctgcctccctcaccatctctggactgaagactgaggacgcggctgactactactgt

SEQ ID NO: 10322 - DNA, 108 bp, synthetic construct
  misc_feature 1..108: note = Synthetic construct
  source 1..108: mol_type = other DNA
tccagggccactgatatcccagtcaggttccgtggcagtgggtctgggacagagttcactctcaccatcagcagcctgcagtctgaagattttgcagtttattactgt

SEQ ID NO: 10323 - DNA, 108 bp, synthetic construct
  misc_feature 1..108: note = Synthetic construct
  source 1..108: mol_type = other DNA
gaccggccctcagggatccctgagcgattctctggctccaactctgggaacacggccaccctgaccatcaccagagtcgaagccggggatgaggccgactattcctgt

SEQ ID NO: 10324 - DNA, 108 bp, synthetic construct
  misc_feature 1..108: note = Synthetic construct
  source 1..108: mol_type = other DNA
aagcggccctcaggggtccctgatcgcttctctggctccaagtctggcaacacggcctccctgaccatctctgggctccaggctgaagatgaggctgattattactgc

SEQ ID NO: 10325 - DNA, 108 bp, synthetic construct
  misc_feature 1..108: note = Synthetic construct
  source 1..108: mol_type = other DNA
acccgagaatccggggtccctgaccgattcagtggcagcgggtctgggacagatttcactctcaccatcaacagcctgcaggctgaagatgtggcagtttattactgt

SEQ ID NO: 10326 - DNA, 108 bp, synthetic construct
  misc_feature 1..108: note = Synthetic construct
  source 1..108: mol_type = other DNA
actttgcaaagtggagtcccgtcaaggttcagtggcagtggttctgggacagatttcactctcaccatcagcagtctgcaacctgaagattttgcgatttacttctgt

SEQ ID NO: 10327 - DNA, 108 bp, synthetic construct
  misc_feature 1..108: note = Synthetic construct
  source 1..108: mol_type = other DNA
accagggccactggtatcccagccaggttcagtggcagtgggtctgggacagagttcactctcaccatcagcagcctgcagtctgaagatttggcggtttattactgt

SEQ ID NO: 10328 - DNA, 108 bp, synthetic construct
  misc_feature 1..108: note = Synthetic construct
  source 1..108: mol_type = other DNA
agtttgcaaagtggggtcccatcgaggttcagcggcagtggatctgggacagaattcactctcacaatcagcagcctgcagcctgaagattttgcaacctattactgt

SEQ ID NO: 10329 - DNA, 108 bp, synthetic construct
  misc_feature 1..108: note = Synthetic construct
  source 1..108: mol_type = other DNA
actcgggcctccggagtccctgccaggttccgtggcactggatcaggcacagattttacactgagaatcagcagagtggaggctgaggatgttggggtttattactgc

SEQ ID NO: 10330 - DNA, 108 bp, synthetic construct
  misc_feature 1..108: note = Synthetic construct
  source 1..108: mol_type = other DNA
aatttgcaagatggagtcccatcaaggttcagtggcagtggatctgggacagatttcactctcaccatcagtagtctccaacctgaagattttgcaacttactactgt

SEQ ID NO: 10331 - DNA, 108 bp, synthetic construct
  misc_feature 1..108: note = Synthetic construct
  source 1..108: mol_type = other DNA
aaacggccctcagggatcccagaccgattctctggctccagctcaggaaacacagataccttgaccatcactggggttcaggcggaagatgagggtgactattattgt

SEQ ID NO: 10332 - DNA, 108 bp, synthetic construct
  misc_feature 1..108: note = Synthetic construct
  source 1..108: mol_type = other DNA
aacagggccactggcatcccagccaggttcagtggcagtgggtctgggacagacttcactctcaccatcagcagcctagagcctgaagattttgcactttattactgt

SEQ ID NO: 10333 - DNA, 108 bp, synthetic construct
  misc_feature 1..108: note = Synthetic construct
  source 1..108: mol_type = other DNA
accagggccactggtatcccagccacgttcagtggcagtgggtctgggacagagttcactctcaccatcagcagcctgcagtctgaagattttgcagtttattactgt

SEQ ID NO: 10334 - DNA, 108 bp, synthetic construct
  misc_feature 1..108: note = Synthetic construct
  source 1..108: mol_type = other DNA
actttgcaatcaggggtcccatctcggttcagtggcactggatctgggacagatttcactctcaccatcagcagcctgcagcctgaagatgttgcaacttattactgt

SEQ ID NO: 10335 - DNA, 108 bp, synthetic construct
  misc_feature 1..108: note = Synthetic construct
  source 1..108: mol_type = other DNA
actttgcattcaggggtcccatctcggttcagtggcagtggttctgggacagatttcactctcaccatcagcagcctgcagcctgaagatgttgcaacttattactgt

SEQ ID NO: 10336 - DNA, 108 bp, synthetic construct
  misc_feature 1..108: note = Synthetic construct
  source 1..108: mol_type = other DNA
aaccggccctcagggatcgcagaccgattctctggctccatctcaggaaacacagcttccttgaccatcactggggctcaggcggaagatgaggctgactattactgt

SEQ ID NO: 10337 - DNA, 108 bp, synthetic construct
  misc_feature 1..108: note = Synthetic construct
  source 1..108: mol_type = other DNA
gagcggccctcaggggtccctgaccgtttctctggctccaagtctggcacctcagcctccctggccatcagtgggctccaggctgaggatgaggctgattattactgt

SEQ ID NO: 10338 - DNA, 108 bp, synthetic construct
  misc_feature 1..108: note = Synthetic construct
  source 1..108: mol_type = other DNA
gaccggccctcagggatccctgagcgattctctggctccaaatctgggaacacggccaccctgaccatcggcagggtcgaagccggggatgaggccgacttttactgt

SEQ ID NO: 10339 - DNA, 108 bp, synthetic construct
  misc_feature 1..108: note = Synthetic construct
  source 1..108: mol_type = other DNA
caacggcccacaggggtccccgaccgattcctcggctccaactctggcacctcagcctccctggccatcagtgacctccagactgacgatgaggctgattattactgt

SEQ ID NO: 10340 - DNA, 108 bp, synthetic construct
  misc_feature 1..108: note = Synthetic construct
  source 1..108: mol_type = other DNA
actttgcagtcaggggtcccatctcggttcagtggcagtggatctgggacagaattcactctcaccatcagcagcctgcagcctgaggatgttgcaacttattactgt

SEQ ID NO: 10341 - DNA, 69 bp, synthetic construct
  misc_feature 1..69: note = Synthetic construct
  source 1..69: mol_type = other DNA
aggtcaggaaacacagcttccttgaccatcactggggctcgggcggaagatgaggctgactattactgt

SEQ ID NO: 10342 - DNA, 108 bp, synthetic construct
  misc_feature 1..108: note = Synthetic construct
  source 1..108: mol_type = other DNA
agtttacaaagtggggtcccatcacggttcagcggcagtggatctgggacagaattcactctcaccatcagcagcctgcagcctgatgattttgcaacttattactgc

SEQ ID NO: 10343 - DNA, 108 bp, synthetic construct
  misc_feature 1..108: note = Synthetic construct
  source 1..108: mol_type = other DNA
aggttacaaagtggggtcccaccaaggtttagcggcagtggatctgggacagaattcacactcaccatcagcagtctgcagcctgatgattttgcaacttattactgc

SEQ ID NO: 10344 - DNA, 108 bp, synthetic construct
  misc_feature 1..108: note = Synthetic construct
  source 1..108: mol_type = other DNA
gaccggccctcagggatccctgagcgattttctggctccaactctgggaacacggccaccctgaccatcagcagggtcgaggccggggatgaggccgactattactgt

SEQ ID NO: 10345 - DNA, 108 bp, synthetic construct
  misc_feature 1..108: note = Synthetic construct
  source 1..108: mol_type = other DNA
cagcggccctcaggagtccctcatcgtttctctggctctaagtctggcaacacggcctccctgaccatctctgggctccaggctgacgatgaggctgactattactgc

SEQ ID NO: 10346 - DNA, 108 bp, synthetic construct
  misc_feature 1..108: note = Synthetic construct
  source 1..108: mol_type = other DNA
gaccggccctcagggatccctgagcgattctctggctccaactctgggaactcggccaccctgaccatcagcagggtcgaggccggggatgaggccgactactactgt

SEQ ID NO: 10347 - DNA, 108 bp, synthetic construct
  misc_feature 1..108: note = Synthetic construct
  source 1..108: mol_type = other DNA
agcaagggggacgggatccctgatcgcttctcaggctccagctctggggctgagcgctacctcaccatctccagcctccagtctgaggatgaggctgactattactgt

SEQ ID NO: 10348 - DNA, 108 bp, synthetic construct
  misc_feature 1..108: note = Synthetic construct
  source 1..108: mol_type = other DNA
actttgcaatcaggggtcccatctcggttcagcggcagtggatctgggacagatttcactctcaccatcagcagcctgcagcctgaagatgttgcaacttattactgt

SEQ ID NO: 10349 - DNA, 108 bp, synthetic construct
  misc_feature 1..108: note = Synthetic construct
  source 1..108: mol_type = other DNA
agtttgccgagtggggtcccatcaagattcactggcagtggatctgggacagatttcactctcaccatcagcagtctgcaacctgaagattttgcaacttactactgt

SEQ ID NO: 10350 - DNA, 108 bp, synthetic construct
  misc_feature 1..108: note = Synthetic construct
  source 1..108: mol_type = other DNA
gagaggccctcagggatccctgagcgattctctggctccacctcagggacaacagtcacgttgaccataagtggagtccaggcagaagacgaggctgactattattgt

SEQ ID NO: 10351 - DNA, 108 bp, synthetic construct
  misc_feature 1..108: note = Synthetic construct
  source 1..108: mol_type = other DNA
actttgcaaagtggggtcccatcaaggttcagtggcagtggatctgggacagatttcactctcaccatcagcagtctccaacctgaagattttgcaacttactactgt

SEQ ID NO: 10352 - DNA, 108 bp, synthetic construct
  misc_feature 1..108: note = Synthetic construct
  source 1..108: mol_type = other DNA
agtgtccaaagtggggtcccatcgaggttcagcggcagtggatctggcacagatttcactctcaccatcagcagcctgcagcctgaagattttgcaacttattactgt

SEQ ID NO: 10353 - DNA, 108 bp, synthetic construct
  misc_feature 1..108: note = Synthetic construct
  source 1..108: mol_type = other DNA
accagggccattgacatccccgccaggttcagtggcagtgggtctgggacagacttcactctcaccatcagcggcctggagcctgaagattttgcagtttattattgt

SEQ ID NO: 10354 - DNA, 108 bp, synthetic construct
  misc_feature 1..108: note = Synthetic construct
  source 1..108: mol_type = other DNA
aacagggccactggcatcccagccaggttcagtggcagtgggtctgggacagacttcactctcaccatcagcagccttgagcctgaagattttgcagtttattactgt

SEQ ID NO: 10355 - DNA, 108 bp, synthetic construct
  misc_feature 1..108: note = Synthetic construct
  source 1..108: mol_type = other DNA
aaccggccctcagggatcccagaccgattctctggctccagctcaggaaacacagcttccttgaccatcactggggctcaggcgaaagatgaggctgactattactgt

SEQ ID NO: 10356 - DNA, 114 bp, synthetic construct
  misc_feature 1..114: note = Synthetic construct
  source 1..114: mol_type = other DNA
caaagaccctctggggtccctgatcggttctctggctccatcgacacctcctccaactctgcctccctcaccatctctggactgaagactgaggacgaggctgactactactgt

SEQ ID NO: 10357 - DNA, 108 bp, synthetic construct
  misc_feature 1..108: note = Synthetic construct
  source 1..108: mol_type = other DNA
aatcggccctcagggatccccgaccgattctctggctccagctcaggaaccacagcttccttgaccatcactggggctcaggcggaagatgaggctgactattactgt

SEQ ID NO: 10358 - DNA, 108 bp, synthetic construct
  misc_feature 1..108: note = Synthetic construct
  source 1..108: mol_type = other DNA
gaccggccctcagggatccctgagcgattctctggctccaactctgggaacacggccaccctgaccatcagcagggtcgaagccggggatgaggccgactattactgt

SEQ ID NO: 10359 - DNA, 108 bp, synthetic construct
  misc_feature 1..108: note = Synthetic construct
  source 1..108: mol_type = other DNA
aagcggccctcagggatccctgagcgattctctggctccaactctgggaacacagccactctgaccatcagcgggacccaggctatggatgaggctgactattactgt

SEQ ID NO: 10360 - DNA, 108 bp, synthetic construct
  misc_feature 1..108: note = Synthetic construct
  source 1..108: mol_type = other DNA
accagggccactggtatcccagccaggttcagtgccagtgggtctgggacagagttcactctcaccatcagcagcctgcagtctgaagattttgcagtttattactgt

SEQ ID NO: 10361 - DNA, 108 bp, synthetic construct
  misc_feature 1..108: note = Synthetic construct
  source 1..108: mol_type = other DNA
agtttgcaaagtggggtcccatcaagattcagcggcagtggatctgggacagatttcactctcaccatcaccagtctgcaggctgaagactctgcaacttactattgt

SEQ ID NO: 10362 - DNA, 108 bp, synthetic construct
  misc_feature 1..108: note = Synthetic construct
  source 1..108: mol_type = other DNA
aaccgggccactggcctcccagccaggttcagtggcagtgggtctgggacggatttcactctcaccatcagcagcctagagcctgacgattttgcagtttattactgt

SEQ ID NO: 10363 - DNA, 108 bp, synthetic construct
  misc_feature 1..108: note = Synthetic construct
  source 1..108: mol_type = other DNA
actttgcaaagtggggtcccatcaaggttcagcggcagtggatctgggacagagttcactctcacaatcagcagcctgcagcctgaagattttgcaacttattactgt

SEQ ID NO: 10364 - DNA, 108 bp, synthetic construct
  misc_feature 1..108: note = Synthetic construct
  source 1..108: mol_type = other DNA
aagcggccctcaggggtttctaatcgcttctctggctccaagtctggcaacacggcctccctgacaatctctgggctccaggctgaggacgactctgattattactgc

SEQ ID NO: 10365 - DNA, 108 bp, synthetic construct
  misc_feature 1..108: note = Synthetic construct
  source 1..108: mol_type = other DNA
accagggccactggtatcacagccaggttcagtggcagcgggtctgggacagagttcactctcaccatcagcagcctgcagtctgaggattttgcagtttattactgt

SEQ ID NO: 10366 - DNA, 108 bp, synthetic construct
  misc_feature 1..108: note = Synthetic construct
  source 1..108: mol_type = other DNA
agtttagagggtggggtcccatcaagattcagcggcagtagatctggtacagaattcactctcaccatcagcggcctgcagtctgatgattttgcaacttattactgc

SEQ ID NO: 10367 - DNA, 28 bp, synthetic construct
  misc_feature 1..28: note = Synthetic construct
  source 1..28: mol_type = other DNA
gactgacgatgaggctgattattactgt

SEQ ID NO: 10368 - DNA, 108 bp, synthetic construct
  misc_feature 1..108: note = Synthetic construct
  source 1..108: mol_type = other DNA
attttagaaagtggggtcccatccacattcagcggcagtggatctgggacagaattcactctcaccatcaccagcgtgcagcctgatgattctgcaacttattactgc

SEQ ID NO: 10369 - DNA, 108 bp, synthetic construct
  misc_feature 1..108: note = Synthetic construct
  source 1..108: mol_type = other DNA
gaccggccctcggggatccctgagcgattttctggctccaactctggtaacacggccaccctgaccatcagcagggtcgaggccggggatgaggccgactatttctgt

SEQ ID NO: 10370 - DNA, 108 bp, synthetic construct
  misc_feature 1..108: note = Synthetic construct
  source 1..108: mol_type = other DNA
accttaaaaagtggggtcccatcaaggttcagcggcagtggatcagggacagaattcactctcaccatcagaagcctgcagcctgatgattttggaacttactactgc

SEQ ID NO: 10371 - DNA, 108 bp, synthetic construct
  misc_feature 1..108: note = Synthetic construct
  source 1..108: mol_type = other DNA
cagcggccctcaggggtccctgaccgattctctggctccaagtctggcacctcagcctccctggccatcagtggactccagtctgaggatgaggctgattattactgt

SEQ ID NO: 10372 - DNA, 108 bp, synthetic construct
  misc_feature 1..108: note = Synthetic construct
  source 1..108: mol_type = other DNA
accagggccactggtatcccagccaggttcagtggcagtgggtctgggacagagttcaatctcaccatcagcagcctgcagcctgaagattttgcagtttattactgt

SEQ ID NO: 10373 - DNA, 108 bp, synthetic construct
  misc_feature 1..108: note = Synthetic construct
  source 1..108: mol_type = other DNA
agcagtgacattgggatttctaatcgcttctctggctccaagtctggcaacacggcctccctgaccatctctgggctccaggctgacgacgaggctgattattactgc

SEQ ID NO: 10374 - DNA, 108 bp, synthetic construct
  misc_feature 1..108: note = Synthetic construct
  source 1..108: mol_type = other DNA
actttacaaagtggggtcccatcaaggttcagcggcagtggatctgggacagaattcactctcaccatcagcagcctgcagcctgatgattttgcaatttattattgc

SEQ ID NO: 10375 - DNA, 108 bp, synthetic construct
  misc_feature 1..108: note = Synthetic construct
  source 1..108: mol_type = other DNA
acccgggattccggggtccctgaccgattcagtggcagcgggtctgggacagatttcactctcaccatcagcagcctgcaggctgaagatgtggcagtttatttctgt

SEQ ID NO: 10376 - DNA, 108 bp, synthetic construct
  misc_feature 1..108: note = Synthetic construct
  source 1..108: mol_type = other DNA
atccggccctcagggatctcagaccgattccatggctccacagttggaaacacagcttccctgcatatcgccggggttcaggcggacgatgagggcacttatttctgt

SEQ ID NO: 10377 - DNA, 108 bp, synthetic construct
  misc_feature 1..108: note = Synthetic construct
  source 1..108: mol_type = other DNA
agtttagaaagtggggtcccatcaagattcagcggcagtggatctgggacagaattcactctcaccatcagcagcctgcagcctgatgattttgcaacttattactgc

SEQ ID NO: 10378 - DNA, 108 bp, synthetic construct
  misc_feature 1..108: note = Synthetic construct
  source 1..108: mol_type = other DNA
aatcggccctcaggggtttctaatcgcttctctggctccaagtctggcaacacggcctccctgaccatctctgggctccaggctgaggacgaggctgattattactgc

SEQ ID NO: 10379 - DNA, 108 bp, synthetic construct
  misc_feature 1..108: note = Synthetic construct
  source 1..108: mol_type = other DNA
aatcggccctcagggatcccagaccgattctctggctccagctcagggaacacagcttccttgaccatcactggggctcaggcggaagatgaggctgactattactgt

SEQ ID NO: 10380 - DNA, 92 bp, synthetic construct
  misc_feature 1..92: note = Synthetic construct
  source 1..92: mol_type = other DNA
tttctaatcgcttctctggctccaagtctggcaacacggcctccctgaccatctctgggctccaggctgacgacgaggctgattattactgc

SEQ ID NO: 10381 - DNA, 108 bp, synthetic construct
  misc_feature 1..108: note = Synthetic construct
  source 1..108: mol_type = other DNA
ctcagggccactggtgtcccagccaggttcagtggcagtgggtctgggacgcagttcactctcactatcagcagcctgcagtctgaagatttagccgtgtattactgt

SEQ ID NO: 10382 - DNA, 108 bp, synthetic construct
  misc_feature 1..108: note = Synthetic construct
  source 1..108: mol_type = other DNA
aatcggccctcaggggtccctgaccgattctctggctccaagtctggcacctcagcttccctggccatcactgggctccaggctgaggatgaggctgattattactgc

SEQ ID NO: 10383 - DNA, 108 bp, synthetic construct
  misc_feature 1..108: note = Synthetic construct
  source 1..108: mol_type = other DNA
accagggccactggcatcccagacaggttcggtggcagcgggtctgggacagacttcactctcaccatcagcagactggagcctgaagattttgcagtctatttctgt

SEQ ID NO: 10384 - DNA, 108 bp, synthetic construct
  misc_feature 1..108: note = Synthetic construct
  source 1..108: mol_type = other DNA
gaccggccctcagggatccctgagcgattctctggctccagctctggcaacacggccaccctgatcatcagcgcggtcgaggccggggatgaggccgactattactgt

SEQ ID NO: 10385 - DNA, 108 bp, synthetic construct
  misc_feature 1..108: note = Synthetic construct
  source 1..108: mol_type = other DNA
tctttagaaaatggggtcccatcaagattcagcggcagtgggtctgggacagacttcactctcaccatcagtagtctagagcctgaggattttgcagtttattactgt

SEQ ID NO: 10386 - DNA, 108 bp, synthetic construct
  misc_feature 1..108: note = Synthetic construct
  source 1..108: mol_type = other DNA
agcagggccactggcgtcccagccaggttcagtggcagtgggtctgggacagacttcactctcaccatcagtagtctagagcctgaggattttgcagtttattactgt

SEQ ID NO: 10387 - DNA, 58 bp, synthetic construct
  misc_feature 1..58: note = Synthetic construct
  source 1..58: mol_type = other DNA
cccctccacgacgctcttccgatctctcacactcctgcaggccgctgattattactgc

SEQ ID NO: 10388 - DNA, 108 bp, synthetic construct
  misc_feature 1..108: note = Synthetic construct
  source 1..108: mol_type = other DNA
accagggccgctggtatcccagccaggttcagtggcagtgggtctgggacagagttcactctcaccatcagcagcctgcagtctgaagatcttgcagtttatgactgt

SEQ ID NO: 10389 - DNA, 108 bp, synthetic construct
  misc_feature 1..108: note = Synthetic construct
  source 1..108: mol_type = other DNA
aatcgacagtcagggattcctgaccgattctctggctccaagtctggcacgtcagccaccctggacatcaccggactccagactgcggacgaggccgattattactgc

SEQ ID NO: 10390 - DNA, 108 bp, synthetic construct
  misc_feature 1..108: note = Synthetic construct
  source 1..108: mol_type = other DNA
aagcggccctcaggggtttctaatcgcttctctggctccaagtctggcacgtcagccaccctggacatcaccggactccagactgcggacgaggccgattattactgc

SEQ ID NO: 10391 - DNA, 108 bp, synthetic construct
  misc_feature 1..108: note = Synthetic construct
  source 1..108: mol_type = other DNA
aagcgaccctcagagattcctgaccgattctctggctccaagtctgacacgtcaggcaccctggacatcaccggactccagaccggggacgaggccgattattactgc

SEQ ID NO: 10392 - DNA, 108 bp, synthetic construct
  misc_feature 1..108: note = Synthetic construct
  source 1..108: mol_type = other DNA
gaccggccctcagggattcctgagcgagtgtctggctccaactttgggaacacggccaccctgaccatcaccacggtcgaagccggggatgaggccgactacttctgt

SEQ ID NO: 10393 - DNA, 108 bp, synthetic construct
  misc_feature 1..108: note = Synthetic construct
  source 1..108: mol_type = other DNA
actttgcagagtggggtcccatcaaggctcagtggcagtggatctgggacagaattcactctcaccatcaccagtctgcaacctgaagactttgcagcttactactgt

SEQ ID NO: 10394 - DNA, 108 bp, synthetic construct
  misc_feature 1..108: note = Synthetic construct
  source 1..108: mol_type = other DNA
gacagggccactggcatcccagacaggttcagaggcagtggctatgggacagagttcactctcaccatcaccagactggagcctgaagactttgccgtatattactgt

SEQ ID NO: 10395 - DNA, 108 bp, synthetic construct
  misc_feature 1..108: note = Synthetic construct
  source 1..108: mol_type = other DNA
catttaggaggtggggtcccatcgaggttcagcggcagtggatttgggacagaattcacgctcaccatcagcagcctgcagcctgatgattttgcgatttattactgc

SEQ ID NO: 10396 - DNA, 108 bp, synthetic construct
  misc_feature 1..108: note = Synthetic construct
  source 1..108: mol_type = other DNA
aatcgggccccaggggtttctaatcgcttctctggctccaagcttggcaacacggcctccctgaccatctctgggctccagactgaggacgaggctgattatttctgc

SEQ ID NO: 10397 - DNA, 108 bp, synthetic construct
  misc_feature 1..108: note = Synthetic construct
  source 1..108: mol_type = other DNA
aacaaggggagcggagttcctgatcgcttctcaggctccagctctggggctgaccgctacctcaccatctccaacctccagtctgaggatgaggctgatttttactgt

SEQ ID NO: 10398 - DNA, 108 bp, synthetic construct
  misc_feature 1..108: note = Synthetic construct
  source 1..108: mol_type = other DNA
acccgggaatttggggtccctgaccgattcagtggcagcgggtctgggagagatttcactctcaccatcagcagcctgcaggctgaagatgtggcagtttattactgt

SEQ ID NO: 10399 - DNA, 108 bp, synthetic construct
  misc_feature 1..108: note = Synthetic construct
  source 1..108: mol_type = other DNA
actttagaaagtggggtcccatcaaggttcagcggcagtggatctgggacagaattcactctcaccatcagcagcctgcagcctgatgattttgcaacttattactgc

SEQ ID NO: 10400 - DNA, 108 bp, synthetic construct
  misc_feature 1..108: note = Synthetic construct
  source 1..108: mol_type = other DNA
actttgcaatctggggtcccatctcggttcagtggcagtggatctgggacagatttcactctcaccatcagcagcctgcagcctgaggatattgcaacttattactgt

SEQ ID NO: 10401 - DNA, 108 bp, synthetic construct
  misc_feature 1..108: note = Synthetic construct
  source 1..108: mol_type = other DNA
actttagaaagtggggtcccatcaaggttcagcggcagtggatctgggacagaattcactctcaccgtcagcagcctgcagcctgatgattttgcaacttattactgc

SEQ ID NO: 10402 - DNA, 108 bp, synthetic construct
  misc_feature 1..108: note = Synthetic construct
  source 1..108: mol_type = other DNA
agtttgcacgggggggtctcatcaaggtttggtggcagtggatccgggacagaattcactctcaccatcaacagcctgcagcctgaagattttgcaacttattactgc

SEQ ID NO: 10403 - DNA, 108 bp, synthetic construct
  misc_feature 1..108: note = Synthetic construct
  source 1..108: mol_type = other DNA
aatttggagtatggggtccctgcaaggttcagcggcagtggatctgggacacacttcactctcaccatcaggagcctgcagcctgatgattttgcaacttattactgc

SEQ ID NO: 10404 - DNA, 108 bp, synthetic construct
  misc_feature 1..108: note = Synthetic construct
  source 1..108: mol_type = other DNA
aacagggccactggcgtcccagccaggttcagtggcagtgggtctgggacagacttcactctcaccatcagcagcctagagcctgaagattttgcagtttattactgt

SEQ ID NO: 10405 - DNA, 108 bp, synthetic construct
  misc_feature 1..108: note = Synthetic construct
  source 1..108: mol_type = other DNA
aacagaaactcctggacacctgcccggttctcaggctccctccttgggggcaaagctgccctgaccctttcgggtgcgctgcctgacgatgaggctgaatattactgc

SEQ ID NO: 10406 - DNA, 108 bp, synthetic construct
  misc_feature 1..108: note = Synthetic construct
  source 1..108: mol_type = other DNA
aatttggaaagaggggtcccatcaaggttcagtggaagtggatctgggacagattttaatttaaccatcaccagcctgcagcctgaagatattgcaacatattactgt

SEQ ID NO: 10407 - DNA, 108 bp, synthetic construct
  misc_feature 1..108: note = Synthetic construct
  source 1..108: mol_type = other DNA
actttagaaagtggggtcccatctaggttcagcggcagtggctctgggacagaattcactctcaccatcagcagcctgcagcctgatgattttgcaacttatttctgc

SEQ ID NO: 10408 - DNA, 108 bp, synthetic construct
  misc_feature 1..108: note = Synthetic construct
  source 1..108: mol_type = other DNA
aaccgggactctggggccccggacagattcagcggcagtgggtcagtcactgatttcacactgaaaatcagcagggtagaggctgaagatgttggaatttattactgc

SEQ ID NO: 10409 - DNA, 108 bp, synthetic construct
  misc_feature 1..108: note = Synthetic construct
  source 1..108: mol_type = other DNA
accagggccgcaggcatcccagacaggttcagtggcagcgggtctgggacagacttcactctcaccatcagcagactggaacctgaagatttcgcagtatattactgt

SEQ ID NO: 10410 - DNA, 108 bp, synthetic construct
  misc_feature 1..108: note = Synthetic construct
  source 1..108: mol_type = other DNA
aatcggccctctggcatctctaagcgtttctctggctccaagtctggcaacacggcctccctcaccatctctaggctccagcctgaggacgaggctgattactactgc

SEQ ID NO: 10411 - DNA, 108 bp, synthetic construct
  misc_feature 1..108: note = Synthetic construct
  source 1..108: mol_type = other DNA
acccgggattccggggtccctgaccgattcagtggcagcggatctgggacagatttcactctcacaatcagaggcgtgcaggctgaagatgtggcagtctattactgt

SEQ ID NO: 10412 - DNA, 108 bp, synthetic construct
  misc_feature 1..108: note = Synthetic construct
  source 1..108: mol_type = other DNA
aatttacaaagtggggtcccatcaaggttcagcggcagtgggtctgggacagaattcactctcaccgtcaccagcctgcagcctgatgattttgcaacttactactgc

SEQ ID NO: 10413 - DNA, 108 bp, synthetic construct
  misc_feature 1..108: note = Synthetic construct
  source 1..108: mol_type = other DNA
ttcagggccaccggtgtttctcccaggttcagtgccagtggggctggggcggatttcactctcaccatcagcagactgcagtctgaggattctgcagtctacttttgt

SEQ ID NO: 10414 - DNA, 108 bp, synthetic construct
  misc_feature 1..108: note = Synthetic construct
  source 1..108: mol_type = other DNA
gccagggccgctggtgtcccagccaggttcagtgccagtgggtctgggacagagttcactctcaccatcagcagtctgcagtctgaagattttgcaaaatattactgt

SEQ ID NO: 10415 - DNA, 108 bp, synthetic construct
  misc_feature 1..108: note = Synthetic construct
  source 1..108: mol_type = other DNA
aatcggccctcaggggtttctaatcgcttctctggctccaagtctggcaacacggcctccctgatcatctctgggctccaggctgaggacgaggctgattattactgc

SEQ ID NO: 10416 - DNA, 108 bp, synthetic construct
  misc_feature 1..108: note = Synthetic construct
  source 1..108: mol_type = other DNA
agtttgcaaagtggggtcccatcaaggttcagtggcagtggatctgggacagatttcactctcaccatcagcagtctgcaacctgaagattttgcgacttactactgt

SEQ ID NO: 10417 - DNA, 108 bp, synthetic construct
  misc_feature 1..108: note = Synthetic construct
  source 1..108: mol_type = other DNA
aaacgaccctccgggatccctgagagattctctggttccagctcagggacagtggccaccttgactatcagtggggcccaggtggaggatgaaggtgactactactgt

SEQ ID NO: 10418 - DNA, 108 bp, synthetic construct
  misc_feature 1..108: note = Synthetic construct
  source 1..108: mol_type = other DNA
ttattgcaagcaggggtcccatcaaggttcagtggaagtggatctgggacccattttactttcaccatcagtagcctgcagcctgaagacgttgcaacatattactgt

SEQ ID NO: 10419 - DNA, 108 bp, synthetic construct
  misc_feature 1..108: note = Synthetic construct
  source 1..108: mol_type = other DNA
agtttgcaaagtggggtcccgtcaaagttcagcggcagtggatctgggacagatttcactctcaccatcaccagcctgcagcctgaagattttgcaacttattactgc

SEQ ID NO: 10420 - DNA, 108 bp, synthetic construct
  misc_feature 1..108: note = Synthetic construct
  source 1..108: mol_type = other DNA
accagggccactggtgtcccaggcagattcagtggcggtgggtctgggacagagttcactctcaccatcagcggcctgcagcctgaagattttgcagtttattactgt

SEQ ID NO: 10421 - DNA, 108 bp, synthetic construct
  misc_feature 1..108: note = Synthetic construct
  source 1..108: mol_type = other DNA
agcagggccactggcgttccagacaggttcagtggcagtgggtctgggacagacttcactctcaccatcggcagcctggagcccgcagattttgcaatatatttctgt

SEQ ID NO: 10422 - DNA, 108 bp, synthetic construct
  misc_feature 1..108: note = Synthetic construct
  source 1..108: mol_type = other DNA
cagtccatcccaggggtcccctcgaggttcagtggcagtggatctgggacagatttcaccctcaccatcaatagcctggaagctgaagatgctgcaacgtattactgt

SEQ ID NO: 10423 - DNA, 108 bp, synthetic construct
  misc_feature 1..108: note = Synthetic construct
  source 1..108: mol_type = other DNA
agtttgcaaagtggggtcccatcaaggtttagcggcagtggatctgggacagatttcactctcaccatcagcagcctgcagcctgaagattttgcaacttactattgt

SEQ ID NO: 10424 - DNA, 108 bp, synthetic construct
  misc_feature 1..108: note = Synthetic construct
  source 1..108: mol_type = other DNA
actttgcaaagtggggtcccttcaaggttcagtggcagtggatctgggacagatttcactctcaccatcagcagtctgcaacctgaagattctgcaacctactactgt

SEQ ID NO: 10425 - DNA, 108 bp, synthetic construct
  misc_feature 1..108: note = Synthetic construct
  source 1..108: mol_type = other DNA
accagggccactggcgtcccagacaggttcagtggcagtgggtctgggacagacttcactctcagcatcagaggagtgcagcctgaggattctgcagtgtattactgt

SEQ ID NO: 10426 - DNA, 108 bp, synthetic construct
  misc_feature 1..108: note = Synthetic construct
  source 1..108: mol_type = other DNA
acccgggaatccggggtccctgaacgattcagtggcagcgggtctgggacagatttcactctcaccatcagcagcctgcaggctgaagatgtggcagtttattactgt

SEQ ID NO: 10427 - DNA, 108 bp, synthetic construct
  misc_feature 1..108: note = Synthetic construct
  source 1..108: mol_type = other DNA
aagcggccctcaggggtttctaatcgcttctctggctccaagtctggcaacacggcctccctgacaatctctgggctccaggctgaggacgaggctgattattactgc

SEQ ID NO: 10428 - DNA, 108 bp, synthetic construct
  misc_feature 1..108: note = Synthetic construct
  source 1..108: mol_type = other DNA
agtttgcaaagtggggtcccatcaaggttcagcggcagtggatctgggacagaattcactctcacaatcagcagcctgcagcctgaagattttgcaacttattactgt

SEQ ID NO: 10429 - DNA, 108 bp, synthetic construct
  misc_feature 1..108: note = Synthetic construct
  source 1..108: mol_type = other DNA
cggcggccctcagggatcccagagcgattctctggctccaattctgggaaagcggcctctctgaccatcagcgggacccaggctatggatgaggctgactattactgt

SEQ ID NO: 10430 - DNA, 108 bp, synthetic construct
  misc_feature 1..108: note = Synthetic construct
  source 1..108: mol_type = other DNA
aaccggccctcagggatcccagaccgcttctctggctccaactcaggagacacagcttccttgaccatcactggggctcaggcggaagatgaggccgactattactgt

SEQ ID NO: 10431 - DNA, 108 bp, synthetic construct
  misc_feature 1..108: note = Synthetic construct
  source 1..108: mol_type = other DNA
aatttggaaacaggggtcccatcaaggttcagtggaagtggatctgggacagattttactttcaccatcagcgtcctgcagcctgaagatattgcaacatatttctgt

SEQ ID NO: 10432 - DNA, 108 bp, synthetic construct
  misc_feature 1..108: note = Synthetic construct
  source 1..108: mol_type = other DNA
agtttgcaaagtggggtcccatcaaagttcagcggcaatggatctgggtcagatttcactctcaccatcagcagcctgcagcctgaagattttgcaacttattactgc

SEQ ID NO: 10433 - DNA, 107 bp, synthetic construct
  misc_feature 1..107: note = Synthetic construct
  source 1..107: mol_type = other DNA
acccggttctctggagtgccagataggttcagtggcagcgggtcagggacagatttcacactgaaaatcagccgggtggaggctgaggatgttggaattattattgc

SEQ ID NO: 10434 - DNA, 90 bp, synthetic construct
  misc_feature 1..90: note = Synthetic construct
  source 1..90: mol_type = other DNA
cctgaccgattctctgcctccaagtctgactcgtcagccaccctggacatagccggactccagactggcgacgaggccgactactactgc

SEQ ID NO: 10435 - DNA, 95 bp, synthetic construct
  misc_feature 1..95: note = Synthetic construct
  source 1..95: mol_type = other DNA
ggatttctaatcgcttctctggctccaagtctggcaacacggcctccctgatcatctctggcctccaggttgacgacgaggctgattattactgc

SEQ ID NO: 10436 - DNA, 108 bp, synthetic construct
  misc_feature 1..108: note = Synthetic construct
  source 1..108: mol_type = other DNA
aaccgaccctcaggggtttctagtcgcttctctggctccaagtctggcaacacggcctccctgaccatctctgggctccaggctgaggacgaggctacttattactgc

SEQ ID NO: 10437 - DNA, 108 bp, synthetic construct
  misc_feature 1..108: note = Synthetic construct
  source 1..108: mol_type = other DNA
agcagggccactggcatcccagacaggttcagtggcagtgggtctgggacagacttcactctcaccatcagcagaccggagcctgaagattttgcagtgtattactgt

SEQ ID NO: 10438 - DNA, 108 bp, synthetic construct
  misc_feature 1..108: note = Synthetic construct
  source 1..108: mol_type = other DNA
agtttagaaggtggtgtcccatcaaggttcagcggcagtggatctgggacagaattcactctcaccatcagccgcctgcagcctgatgatttttcaacttattactgc

SEQ ID NO: 10439 - DNA, 108 bp, synthetic construct; identical to SEQ ID NO: 1855
  misc_feature 1..108: note = Synthetic construct
  source 1..108: mol_type = other DNA

SEQ ID NO: 10440 - DNA, 108 bp, synthetic construct
  misc_feature 1..108: note = Synthetic construct
  source 1..108: mol_type = other DNA
ggcagggccactggcatcccagacaggttcagtggcagtgggtctgggacagacttcactctcaccatcagcagactggagcctgaagattttgcagtgtattactgt

SEQ ID NO: 10441 - DNA, 108 bp, synthetic construct
  misc_feature 1..108: note = Synthetic construct
  source 1..108: mol_type = other DNA
acccgggaatccggggtccctgaccgattcagtggcagcgggtctgggacagatttctctctcaccatcagcagcctgcaggctgaagatgtggcagtttattactgt

SEQ ID NO: 10442 - DNA, 108 bp, synthetic construct
  misc_feature 1..108: note = Synthetic construct
  source 1..108: mol_type = other DNA
actcgctcttctggggtccctgatcgcttttctggctccatccttgggaacaaagctgccctcaccatcacgggggcccaggcagatgatgaatctgattattactgt

SEQ ID NO: 10443 - DNA, 108 bp, synthetic construct
  misc_feature 1..108: note = Synthetic construct
  source 1..108: mol_type = other DNA
aagcgggactctggggtcccagacagattcagcggcagtgggtcaggcactgatttctcactgaagatcagcagggtggaggctgaggatattgggtcttattactgc

SEQ ID NO: 10444 - DNA, 108 bp, synthetic construct
  misc_feature 1..108: note = Synthetic construct
  source 1..108: mol_type = other DNA
actcgctcttctggggtccctgatcgcttctctggctccatccttgggaacaaagctgccctcaccatcacgggggcccaggcagatgatgaatctgattattactgt

SEQ ID NO: 10445 - DNA, 108 bp, synthetic construct
  misc_feature 1..108: note = Synthetic construct
  source 1..108: mol_type = other DNA
aatcgggcctccggggtccctgacaggttcagtggcagtggatcaggcacagattttacactgaaaatcagcagagtggaggctgaggatgttggggtttattactgc

SEQ ID NO: 10446 - DNA, 108 bp, synthetic construct
  misc_feature 1..108: note = Synthetic construct
  source 1..108: mol_type = other DNA
aatttggaaacaggggtcccatcaaggttcagtggaagtggatctgggacagattttactttcaccatcagcagcctgcagcctgaagatattgcaacatattactgt

SEQ ID NO: 10447 - DNA, 108 bp, synthetic construct
  misc_feature 1..108: note = Synthetic construct
  source 1..108: mol_type = other DNA
actttgcaaagtggggtcccatcaaggttcagtggcagtggatctgggacagatttcactctcactatcagcagtctgcaacctgaagactttgcaacttactactgt

SEQ ID NO: 10448 - DNA, 108 bp, synthetic construct
  misc_feature 1..108: note = Synthetic construct
  source 1..108: mol_type = other DNA
aacagggccactggcatcccagccaggttcagtggcagtgggtctgggacagacttcactctcagcatcagcagcctagagcctgaagattttgcagtttattactgt

SEQ ID NO: 10449 - DNA, 108 bp, synthetic construct
  misc_feature 1..108: note = Synthetic construct
  source 1..108: mol_type = other DNA
agtttgcaaagtggggccccatcaaggttcagtggcagtggatctgggacagatttcactctcaccatcagcagtctgcaacctgaagattttacaacttactactgt

SEQ ID NO: 10450 - DNA, 108 bp, synthetic construct
  misc_feature 1..108: note = Synthetic construct
  source 1..108: mol_type = other DNA
aaccgtgacgctggtgtcccagacagattcagcggcagtgagtcaggcactgatttcatactaaaaatcagtagtgtggaggctgaggatcttggcatttattactgc

SEQ ID NO: 10451 - DNA, 108 bp, synthetic construct
  misc_feature 1..108: note = Synthetic construct
  source 1..108: mol_type = other DNA
gaccggccctcagggatccctgagcgattctctggctccaactctgggaacacggccaccctgacaatcaccagggtcgaagccggagatgaggccgaatatttctgt

SEQ ID NO: 10452 - DNA, 114 bp, synthetic construct
  misc_feature 1..114: note = Synthetic construct
  source 1..114: mol_type = other DNA
caaagaccctctggggtcccggctcggttctctggctccatcgacagctcctccaattctgcctccctcaccatctctggactgcagactgaggacgagggtgactactattgt

SEQ ID NO: 10453 - DNA, 108 bp, synthetic construct
  misc_feature 1..108: note = Synthetic construct
  source 1..108: mol_type = other DNA
actttggaaagtggggtcccatcaaggttcagtggcgctggatctgggacagaattcactctcaccatcagcaacctgcagccggatgactttgcgatttattactgc

SEQ ID NO: 10454 - DNA, 108 bp, synthetic construct
  misc_feature 1..108: note = Synthetic construct
  source 1..108: mol_type = other DNA
atcagggccactggcgtcccagccaggttcagtggcagtgggtctgggacagacttcactctcaccatcagtggcctgcagtctgaagattttgcaacgtattattgt

SEQ ID NO: 10455 - DNA, 108 bp, synthetic construct
  misc_feature 1..108: note = Synthetic construct
  source 1..108: mol_type = other DNA
acccgggaatccggagtccctgaccgaatcagtggcagcgggtctgggacagatttcactctcaccatcagcagcctgcaggctgaagatgtggcagtttattactgt

SEQ ID NO: 10456 - DNA, 108 bp, synthetic construct
  misc_feature 1..108: note = Synthetic construct
  source 1..108: mol_type = other DNA
gagcggccctcagggatccctgagcgattctccggctccaaatcaaggaacacggccaccctgatcatcaactgggtcgaggccggggatgaggccgactattcctgt

SEQ ID NO: 10457 - DNA, 108 bp, synthetic construct
  misc_feature 1..108: note = Synthetic construct
  source 1..108: mol_type = other DNA
agtcttctaagtgaggtcccatcgaggttcagtggcagtggatctgggacagatttcgctctcaccatcagcagtctgcaacctgaagactttgcaacttactactgt

SEQ ID NO: 10458 - DNA, 114 bp, synthetic construct
  misc_feature 1..114: note = Synthetic construct
  source 1..114: mol_type = other DNA
caaagaccctctggggtccctgatcggttctctggctccatcgacagctcctccaactctgcctcccttcacatctctggactgaagactgaggacgaggctgactactactgt

SEQ ID NO: 10459 - DNA, 105 bp, synthetic construct
  misc_feature 1..105: note = Synthetic construct
  source 1..105: mol_type = other DNA
tctggagttcccagccgcttctctggatccaacgatgcatcagccaatgcagggattctgcgtatccctgggctccagcctgaggatgaggctgactattactgt

SEQ ID NO: 10460 - DNA, 108 bp, synthetic construct
  misc_feature 1..108: note = Synthetic construct
  source 1..108: mol_type = other DNA
cagcggccctcaggggtccctgaccgattctctggctccaagtctggcacctcagcctccctggccatcagtgggctccaggccgaggatgaggctgattattcctgt

SEQ ID NO: 10461 - DNA, 108 bp, synthetic construct
  misc_feature 1..108: note = Synthetic construct
  source 1..108: mol_type = other DNA
actttacaaagtggggtcccatcaaggttcagtggcagtggatctgggacaactttcactctctccatcagctgcctgcagtctgaagattttgcaacttattactgt

SEQ ID NO: 10462 - DNA, 108 bp, synthetic construct
  misc_feature 1..108: note = Synthetic construct
  source 1..108: mol_type = other DNA
aggcgaccctcagggattcctgaccgattctctggctccaagtctggcacgtcagccaccctgggcatcaccggactccagactggggacgaggccgattatttctgc

SEQ ID NO: 10463 - DNA, 108 bp, synthetic construct
  misc_feature 1..108: note = Synthetic construct
  source 1..108: mol_type = other DNA
attttacatagtggggtcccgtcaaggttcagcggcagtgggtctgggacagatttcactctcaccatcagcagcctgcagcctgaagattttgcaacttactattgt

SEQ ID NO: 10464 - DNA, 108 bp, synthetic construct
  misc_feature 1..108: note = Synthetic construct
  source 1..108: mol_type = other DNA
acccgggaatccggggtccctgaccgattcagtggcagcgggtctgggacagacttcactctcaccatcagcagtctgcaggctgaagatgtggcagtttatttctgt

SEQ ID NO: 10465 - DNA, 114 bp, synthetic construct
  misc_feature 1..114: note = Synthetic construct
  source 1..114: mol_type = other DNA
caaagaccctctggggtacctgatcgcttctttggctccatcgacaagtcctccaactctgcctccctcaccatatctgggctcgagactgacgacgaggctgactacttctgt

SEQ ID NO: 10466 - DNA, 108 bp, synthetic construct
  misc_feature 1..108: note = Synthetic construct
  source 1..108: mol_type = other DNA
ttccggccctccgggatccctgagcgagtctctggctccaactctagggacacggccaccctgaccctcaacagagtcgaggccggggatgaggccgactattattgt

SEQ ID NO: 10467 - DNA, 108 bp, synthetic construct
  misc_feature 1..108: note = Synthetic construct
  source 1..108: mol_type = other DNA
aagcggccctcaggggtccctgatcgcttctctggctccaagtctggctacacggcctccctgaccatctctgggctccgggctgacgatgaggctgattattactgc

SEQ ID NO: 10468 - DNA, 108 bp, synthetic construct
  misc_feature 1..108: note = Synthetic construct
  source 1..108: mol_type = other DNA
tatttagaaggtggggtcccatcaaggttcagcggcagtggatctgggacagaattctctctcaccatcagcagactgcagcctgatgatcttgcaacttattactgc

SEQ ID NO: 10469 - DNA, 108 bp, synthetic construct
  misc_feature 1..108: note = Synthetic construct
  source 1..108: mol_type = other DNA
aatttagaaggtggggtcccatcaaggttcagcggcagtggatctgggacagaattctctctcaccatcagcagactgcagcctgatgatcttgcaacttattactgc

SEQ ID NO: 10470 - DNA, 108 bp, synthetic construct
  misc_feature 1..108: note = Synthetic construct
  source 1..108: mol_type = other DNA
aatttacaaagtggggtcccaccaaggttcagcggcagtggatttgggacagaattcactctcgccatcagcagcctgcagcctgatgattttgcaacttatttctgc

SEQ ID NO: 10471 - DNA, 108 bp, synthetic construct
  misc_feature 1..108: note = Synthetic construct
  source 1..108: mol_type = other DNA
agtttacagagtggagtcccatcaaggttcagcggcagtggatctgagacagaattcactctcaccatcagcagcctgcagcctgatgattttggaacttattactgc

SEQ ID NO: 10472 - DNA, 108 bp, synthetic construct
  misc_feature 1..108: note = Synthetic construct
  source 1..108: mol_type = other DNA
aagcgggactctggggtcccagacagattcagcggcagtgggtccggcactaatttcacactgaagatcagcagggtggaggctgaggatgttggggattattactgc

SEQ ID NO: 10473 - DNA, 29 bp, synthetic construct
  misc_feature 1..29: note = Synthetic construct
  source 1..29: mol_type = other DNA
aggctgacgacgaggctgattattactgc

SEQ ID NO: 10474 - DNA, 108 bp, synthetic construct
  misc_feature 1..108: note = Synthetic construct
  source 1..108: mol_type = other DNA
agtatagaaagtggggtcccatcaaggttcagcggcagtggatctgggacagaattcactctcaccatcaccagcctgcaccctgatgattttgcaacttattactgc

SEQ ID NO: 10475 - DNA, 108 bp, synthetic construct
  misc_feature 1..108: note = Synthetic construct
  source 1..108: mol_type = other DNA
actttgcaaaggggggtcccatcaagatttagcgccagtgcatctggggaggacttcactctcacaatcaacagcctgcagcctgaagattttgcaacttattactgt

SEQ ID NO: 10476 - DNA, 108 bp, synthetic construct
  misc_feature 1..108: note = Synthetic construct
  source 1..108: mol_type = other DNA
gagaggccctcacggattcctgaacgattctctggctccagctcagggacaacagccacgttgaccatcattacagtccaggcagaagacgaggctgactattactgt

SEQ ID NO: 10477 - DNA, 108 bp, synthetic construct
  misc_feature 1..108: note = Synthetic construct
  source 1..108: mol_type = other DNA
catcggccctcaggggtctctgaccgattctctggctccaagtctggcacttcagcctccctggccatcactgggctccagcctcaggatgacggttattattattgt

SEQ ID NO: 10478 - DNA, 108 bp, synthetic construct
  misc_feature 1..108: note = Synthetic construct
  source 1..108: mol_type = other DNA
aacagggccactggcatcccagccaggttcagtggcagtgggtctgggacagacttcactctcaccatcagcagcctagagcctgaagattgtgcagtttattactgt

SEQ ID NO: 10479 - DNA, 108 bp, synthetic construct
  misc_feature 1..108: note = Synthetic construct
  source 1..108: mol_type = other DNA
aatttgcaaagtgcgctcccatcaaggttcagtggcagtggatctgggacagatttcactctcaccatcagcagtctgcaacctgaggattttgcagcctacttttgt

SEQ ID NO: 10480 - DNA, 69 bp, synthetic construct
  misc_feature 1..69: note = Synthetic construct
  source 1..69: mol_type = other DNA
aagtctggcaacccggcctccctgaccatctctgggctccaggctgacgacgaggctgattattactgc

SEQ ID NO: 10481 - DNA, 108 bp, synthetic construct
  misc_feature 1..108: note = Synthetic construct
  source 1..108: mol_type = other DNA
aatcggccctcagggatttctaatcgcttctctggctccaagtctggcaacacggcctccctgaccatctctgggctccaggctgacgacgaggctgattattacttc

SEQ ID NO: 10482 - DNA, 108 bp, synthetic construct
  misc_feature 1..108: note = Synthetic construct
  source 1..108: mol_type = other DNA
atcagggccactggcatcccagccaggttcagtggcagtgggtctgggacagacttcactctcaccatcagcagcctagagcctgaagattttgcagtttattactgt

SEQ ID NO: 10483 - DNA, 108 bp, synthetic construct
  misc_feature 1..108: note = Synthetic construct
  source 1..108: mol_type = other DNA
actttgcaaagtggggtcccatcaaggttcagcggcagtggatttgagacagatttcactctcaccataaccagcctgcagcctgaagattttgcaacttattactgc

SEQ ID NO: 10484 - DNA, 108 bp, synthetic construct
  misc_feature 1..108: note = Synthetic construct
  source 1..108: mol_type = other DNA
aaccggttctctggggtcccagacagattcagtggcagtggggctgggacagatttcacactgaaaatcagcagggtggaagctgaggatgtcggggtttattactgc

SEQ ID NO: 10485 - DNA, 108 bp, synthetic construct
  misc_feature 1..108: note = Synthetic construct
  source 1..108: mol_type = other DNA
aatcggccctcaggggtttctaatcgcttctctggctccaagtctggcaacacggcctccctgaccatctctgggctccaggctgaggacgagggtgattattactgc

SEQ ID NO: 10486 - DNA, 108 bp, synthetic construct
  misc_feature 1..108: note = Synthetic construct
  source 1..108: mol_type = other DNA
gccagggccactggtgtcccagccaggttcagtggcagtgggtctgacacagagttcactctcaccatcagcagcctgcagtctgaagattttgcagtttattactgt

SEQ ID NO: 10487 - DNA, 108 bp, synthetic construct
  misc_feature 1..108: note = Synthetic construct
  source 1..108: mol_type = other DNA
aagagggccactggcgtcccagccaggttcagtggcagtgggtctgggacagacttcactctcaccatcagcagcctagaggctgaagattttgcggtttattattgt

SEQ ID NO: 10488 - DNA, 108 bp, synthetic construct
  misc_feature 1..108: note = Synthetic construct
  source 1..108: mol_type = other DNA
gagcgaccctcagggattcctgaccgattctctggctccaagtctggcacgtcagccaccctgggcatcaccggactccagactggggacgaggccgattattactgc

SEQ ID NO: 10489 - DNA, 108 bp, synthetic construct
  misc_feature 1..108: note = Synthetic construct
  source 1..108: mol_type = other DNA
aagcggccctcaggggtttctaatcgcttctctggctccaagtctggcaacacggcctccctgacaatctctgggctccaggctgacgacgaggctgattattactgc

SEQ ID NO: 10490 - DNA, 108 bp, synthetic construct
  misc_feature 1..108: note = Synthetic construct
  source 1..108: mol_type = other DNA
agtttgcaaagtggggtcccatcaaggttcagcggcagtggatctgggacagatttcactctcaccatcagcagcctgcaacctgaagattttgcaacttactattgt

SEQ ID NO: 10491 - DNA, 108 bp, synthetic construct
  misc_feature 1..108: note = Synthetic construct
  source 1..108: mol_type = other DNA
gaccggccctccgggatccctgagcgattctctggctccaactctgggaacacggccaccctgaccatcagcagggtcgaagccggggatgaggccgactattactgt

SEQ ID NO: 10492 - DNA, 108 bp, synthetic construct
  misc_feature 1..108: note = Synthetic construct
  source 1..108: mol_type = other DNA
aacagggccactggcatcccagccaggttcagtggcagtgggtctgggacagacttcactctcaccatcagcagcctagagcctgaagattctgcagtttattactgt

SEQ ID NO: 10493 - DNA, 108 bp, synthetic construct
  misc_feature 1..108: note = Synthetic construct
  source 1..108: mol_type = other DNA
actttgcaatatggggtcccatcaaggttcagcggcagtggatctgggacagacttcactctcacaatcagcagcctgcagcctgaagattttgcaacttattactgt

SEQ ID NO: 10494 - DNA, 108 bp, synthetic construct
  misc_feature 1..108: note = Synthetic construct
  source 1..108: mol_type = other DNA
atcagggccgctggtgtcccaaccaggttcagtgccagtgggtctgagacggacttcactctcaccatcagcagtgtgcaatctgaagattttgcagattattactgt

SEQ ID NO: 10495 - DNA, 114 bp, synthetic construct
  misc_feature 1..114: note = Synthetic construct
  source 1..114: mol_type = other DNA
caaagaccctctggggtccctgatcggttctctggctccatcgacagctcctccaactctgcctccctcaccatctctggactgaggcctgacgacgaggctgactactactgt

SEQ ID NO: 10496 - DNA, 108 bp, synthetic construct
  misc_feature 1..108: note = Synthetic construct
  source 1..108: mol_type = other DNA
actttgcaaactggggtcccatcaaggttcattggcagtggatctgggacagatttcactctcaccatcacctccctgcagtctgaagattttgcatcctattactgt

SEQ ID NO: 10497 - DNA, 108 bp, synthetic construct
  misc_feature 1..108: note = Synthetic construct
  source 1..108: mol_type = other DNA
aggcgaccctcagggattcctgaccgattctctggttccaagtctggcacgtcagccaccctggacatcaccggactccagactggggacgaggccgattattactgc

SEQ ID NO: 10498 - DNA, 108 bp, synthetic construct
  misc_feature 1..108: note = Synthetic construct
  source 1..108: mol_type = other DNA
actttgcaaagaggggtcccatcaaggttcagtggcagtggatctgggacagaattcactctcaccatcagttgcctgcagtctgaggattttgcaacttactactgt

SEQ ID NO: 10499 - DNA, 108 bp, synthetic construct
  misc_feature 1..108: note = Synthetic construct
  source 1..108: mol_type = other DNA
aagcggccttcagggatccctgagcgattctctggctccaactctgggaacacagccactctgaccatcagcgggacccaggctatggatgaggctgcctattactgt

SEQ ID NO: 10500 - DNA, 108 bp, synthetic construct
  misc_feature 1..108: note = Synthetic construct
  source 1..108: mol_type = other DNA
actttgcacagtggggtcccttccaggttcagtggcagtggatctgggacagatttcactctcaccatcagcagtctgcaacctgaagattttgcaacttactactgt

SEQ ID NO: 10501 - DNA, 108 bp, synthetic construct
  misc_feature 1..108: note = Synthetic construct
  source 1..108: mol_type = other DNA
aagcggccctctggggtttctaatcgcttctctggctccaagtctggcaacacggcctccctgacaatctctgggctccaggctgaagacgaggctgattattactgc

SEQ ID NO: 10502 - DNA, 108 bp, synthetic construct
  misc_feature 1..108: note = Synthetic construct
  source 1..108: mol_type = other DNA
aagcggccctctggggtttctaatcgcttctctggctccaagtctggcaacacggcctccctgacaatctctgggctccaggctgaggacgaggttgattattactgc

SEQ ID NO: 10503 - DNA, 96 bp, synthetic construct
  misc_feature 1..96: note = Synthetic construct
  source 1..96: mol_type = other DNA
ggggtttctaatcgcttctctggctccaagtctggcaacacggcctccctgacaatctctgggctccaggctgaagacgaggctgattattactgc

SEQ ID NO: 10504 - DNA, 108 bp, synthetic construct
  misc_feature 1..108: note = Synthetic construct
  source 1..108: mol_type = other DNA
aatcggccctcagggatttctaatcgcttctctggctccaagtctggcaacacggcctccctgacaatctctgggctccaggctgacgacgaggctgattattactgc

SEQ ID NO: 10505 - DNA, 108 bp, synthetic construct
  misc_feature 1..108: note = Synthetic construct
  source 1..108: mol_type = other DNA
aaccgaccctcagggattcctgaccgattctctggctccaagtctggcacgtcagccaccctgggcatcaccggactccagactggggacgaggccgattattactgc

SEQ ID NO: 10506 - DNA, 108 bp, synthetic construct
  misc_feature 1..108: note = Synthetic construct
  source 1..108: mol_type = other DNA
aagcggccctcaggggtttctaatcgcttctctggctccaagtctggcacgtcagccaccctgggcatcaccggactccagactggggacgaggccgattattactgc

SEQ ID NO: 10507 - DNA, 108 bp, synthetic construct
  misc_feature 1..108: note = Synthetic construct
  source 1..108: mol_type = other DNA
gatcggccctcaggggtctctaatcgcttctctggctccaagtctggcaacacggcctccctgactatctctgggctccaggctgaggacgaggctgattattactgc

SEQ ID NO: 10508 - DNA, 108 bp, synthetic construct
  misc_feature 1..108: note = Synthetic construct
  source 1..108: mol_type = other DNA
aagcggccctcagggatccctgagcgattctctggctccaactctggggacacagccactctgaccatcaccgggacccagccgacggatgaggctgtctattactgt

SEQ ID NO: 10509 - DNA, 108 bp, synthetic construct
  misc_feature 1..108: note = Synthetic construct
  source 1..108: mol_type = other DNA
aatcgggactctggggtcccagacagattcagcggcagtgggtcaggcactgacttcacactggaaatcagcagcgtggaggctgaggatgttggggtttattactgc

SEQ ID NO: 10510 - DNA, 108 bp, synthetic construct
  misc_feature 1..108: note = Synthetic construct
  source 1..108: mol_type = other DNA
acccgggaatccggggtccctgaccgattcagtggcagcgggtctgggacagatttcactctcaccatcagcagcctgcaggctgacgatgtggcagtttattactgt

SEQ ID NO: 10511 - DNA, 108 bp, synthetic construct
  misc_feature 1..108: note = Synthetic construct
  source 1..108: mol_type = other DNA
agcagggccactggcaccccagacaggttcagtggcagtgggtctgggacagagttcactctcaccatcagcagcctgcagtctgaagattttgcagtttattactgt

SEQ ID NO: 10512 - DNA, 108 bp, synthetic construct
  misc_feature 1..108: note = Synthetic construct
  source 1..108: mol_type = other DNA
cttcgcacttctggggtccctgatcgcttctctggctccattattgggaacaaagctgccctcaccatcacgggggcccaggcagatgatgactgtgactattactgt

SEQ ID NO: 10513 - DNA, 108 bp, synthetic construct
  misc_feature 1..108: note = Synthetic construct
  source 1..108: mol_type = other DNA
gatttacaacctggggtcccatcaaggttcagcggcagtgggtctgggacagaattcactctcaccatcaccagcctgcagcctgatgattttggtacttatcactgc

SEQ ID NO: 10514 - DNA, 108 bp, synthetic construct
  misc_feature 1..108: note = Synthetic construct
  source 1..108: mol_type = other DNA
actttgcaatcaggggtcccatctcggttcagtggcagtggatctgggacagatttcactctcaccatcagcagcctgcagcctgaagatgttgcaacttattactgt

SEQ ID NO: 10515 - DNA, 108 bp, synthetic construct
  misc_feature 1..108: note = Synthetic construct
  source 1..108: mol_type = other DNA
tacaaatactcctggacacctgcccgcttctcaggctccctccttgggggcaaagctgccctgaccctttcgggtgcgctgcctgaggatgaggctgactattactgc

SEQ ID NO: 10516 - DNA, 108 bp, synthetic construct
  misc_feature 1..108: note = Synthetic construct
  source 1..108: mol_type = other DNA
acccgggaatccggggtccctgaccgattcagtggcagcgggtctgggacagacttcactctcaccatcagcagtgtgcaggctgaagatgtggcaatttattactgt

SEQ ID NO: 10517 - DNA, 108 bp, synthetic construct
  misc_feature 1..108: note = Synthetic construct
  source 1..108: mol_type = other DNA
aaccggttctctggagtgccagataggttcagtggcagcgggtcagggacagatttcacactgaaaatcagccgggtggaggctgaggatgttggagtttattactgc

SEQ ID NO: 10518 - DNA, 108 bp, synthetic construct
  misc_feature 1..108: note = Synthetic construct
  source 1..108: mol_type = other DNA
agtttgcaaagtggggtcccatcgaggttcagtggcagtggatctgggacagatttcactctcaccatcagcagtctgcaacctgaagattttgcaacttactactgt

SEQ ID NO: 10519 - DNA, 108 bp, synthetic construct
  misc_feature 1..108: note = Synthetic construct
  source 1..108: mol_type = other DNA
agtttgcaaaatggggtcccatcaaggttcagcggcagtggctctgggacagatttcactctcaccatcagcagcctgcagcctgaagattttgcaacttacttttgt

SEQ ID NO: 10520 - DNA, 108 bp, synthetic construct
  misc_feature 1..108: note = Synthetic construct
  source 1..108: mol_type = other DNA
aagcggccctcaggggtccctgatcgcttctctggctccaagtctggcaacacggcctccctgaccgtctctgggctccaggctgaagatgaggctgattattactgc

SEQ ID NO: 10521 - DNA, 108 bp, synthetic construct
  misc_feature 1..108: note = Synthetic construct
  source 1..108: mol_type = other DNA
actcggcccactgggatcccagccaagttcaggggcagtgggtctgggacagaattcactctcaccatcgtcagcctccagtctgaagattttgcagtttattactgt

SEQ ID NO: 10522 - DNA, 108 bp, synthetic construct
  misc_feature 1..108: note = Synthetic construct
  source 1..108: mol_type = other DNA
aatcggccctcaggagttgctcatcggttctctggctccaagtctggcaacacggcctccctgaccatctctgggctccaggctgaggacgaggctgattattactgc

SEQ ID NO: 10523 - DNA, 108 bp, synthetic construct
  misc_feature 1..108: note = Synthetic construct
  source 1..108: mol_type = other DNA
actttaaatagtggggtcccgtcgaggttcagcggcagtggatctgggacagacttcaccctcaccatcagcagcctgcagcctgatgattttgcaacttattactgc

SEQ ID NO: 10524 - DNA, 108 bp, synthetic construct
  misc_feature 1..108: note = Synthetic construct
  source 1..108: mol_type = other DNA
aaccggccctcagggatcccagaccgattctctggctccacctcaggaaacacagcttccttgaccatcactggggctcaggcggaagatgaggctgactattactgt

SEQ ID NO: 10525 - DNA, 108 bp, synthetic construct
  misc_feature 1..108: note = Synthetic construct
  source 1..108: mol_type = other DNA
cagcggccctcaggggtccctgaccgattctctggctccaagtctggcacctcagcctccctggccatcagtgggctccaggctgaggatgaggctgattattactgt

SEQ ID NO: 10526 - DNA, 108 bp, synthetic construct
  misc_feature 1..108: note = Synthetic construct
  source 1..108: mol_type = other DNA
aatcgaccctcgggggtttctaatcgcttctctggctccaagtctggcaacacggcctccctgaccatctctgggctccaggctgaggacgagggtgactattactgc

SEQ ID NO: 10527 - DNA, 108 bp, synthetic construct
  misc_feature 1..108: note = Synthetic construct
  source 1..108: mol_type = other DNA
agcaggaccactggcatcccagacaggttcagtggtggtgggtctgggacagacttcactctcaccatcagcagactggagcctgaagattttgcagtgttttactgt

SEQ ID NO: 10528 - DNA, 108 bp, synthetic construct
  misc_feature 1..108: note = Synthetic construct
  source 1..108: mol_type = other DNA
caattgcaaaggggggtcccatcaaggttcagcggctggggatatgggaaaaatttcactctcaccgtcagcagcctgcagcctgaagattttgcaatttattactgt

SEQ ID NO: 10529 - DNA, 108 bp, synthetic construct
  misc_feature 1..108: note = Synthetic construct
  source 1..108: mol_type = other DNA
gaccggccctcagggatccctgagcgattctctggctccaactctgagaacacggccaccctgaccatcagcagggtcgaagccggggatgaggccgactatttctgt

SEQ ID NO: 10530 - DNA, 108 bp, synthetic construct
  misc_feature 1..108: note = Synthetic construct
  source 1..108: mol_type = other DNA
accagggccactggtatcccagccaggttcagtggcagtgggtctgggacagaattcactctcaccatcagcagcctgcagtctgaagattttgcagtttattactgt

SEQ ID NO: 10531 - DNA, 108 bp, synthetic construct
  misc_feature 1..108: note = Synthetic construct
  source 1..108: mol_type = other DNA
accagggccactggtgtcccagccaggttcagtggcagtgggtctgggacagagttcactctcaccatctacagcctccagtctgaagactttgcagtctactactgt

SEQ ID NO: 10532 - DNA, 108 bp, synthetic construct
  misc_feature 1..108: note = Synthetic construct
  source 1..108: mol_type = other DNA
aagcggccctcaggtgtttctaatcgcttctctggctccaagtccggcaacacggcctccctgacaatctctggactccaggctgaggacgaggctgattattattgc

SEQ ID NO: 10533 - DNA, 108 bp, synthetic construct
  misc_feature 1..108: note = Synthetic construct
  source 1..108: mol_type = other DNA
aagcggccctcaggggtttctaatcgcttctctggctccaagtccggcaacacggcctccctgacaatctctggactccaggctgaggacgaggctgattattattgc

SEQ ID NO: 10534 - DNA, 108 bp, synthetic construct
  misc_feature 1..108: note = Synthetic construct
  source 1..108: mol_type = other DNA
acccgggaatccggggtccctgaccgattcactggcagcgggtctgggacagaattcactctcaccataagcagcctgcaggctgaagatgtggcagtttattactgt

SEQ ID NO: 10535 - DNA, 108 bp, synthetic construct
  misc_feature 1..108: note = Synthetic construct
  source 1..108: mol_type = other DNA
gtccggccctcagggatccctgagcgattctccggctccctgtcctcggacacggccaccctgaccatcagcaggatcgaggccggggatgaggccgactattattgt

SEQ ID NO: 10536 - DNA, 108 bp, synthetic construct
  misc_feature 1..108: note = Synthetic construct
  source 1..108: mol_type = other DNA
accagggccactggcacccccgcccgattcattggcagtgggtctgggacagacttcactctcaccatcagcgacctgcagtctgaagactttggtgtttattactgt

SEQ ID NO: 10537 - DNA, 108 bp, synthetic construct
  misc_feature 1..108: note = Synthetic construct
  source 1..108: mol_type = other DNA
accagggccactggtttcccagccaggttcagtggcagtgggtctgggacagagttcactctcaccatcagcagccttcagtctgaagactttgcagtttattattgt

SEQ ID NO: 10538 - DNA, 108 bp, synthetic construct
  misc_feature 1..108: note = Synthetic construct
  source 1..108: mol_type = other DNA
aacagggcctcgggcatcccagccaggttcagtggcagtgggtctgggacagacttcagtctcaccatcagcagcctagagcctgaagattgtgcagtttattactgt

SEQ ID NO: 10539 - DNA, 108 bp, synthetic construct
  misc_feature 1..108: note = Synthetic construct
  source 1..108: mol_type = other DNA
accagggccaccggtatcccagccaggttcagtggcagtgggtctgggacagagttcactctcaccatcagcagcctgcagtctgacgattttgcagtttattactgt

SEQ ID NO: 10540 - DNA, 108 bp, synthetic construct
  misc_feature 1..108: note = Synthetic construct
  source 1..108: mol_type = other DNA
agtttgcaaagtggggtcccatcaaggttcagtggcagtggatctgggacagatttcactctcaccatcagcagtctgcaacctgaggattttgcaacttactcctgt

SEQ ID NO: 10541 - DNA, 108 bp, synthetic construct
  misc_feature 1..108: note = Synthetic construct
  source 1..108: mol_type = other DNA
aagcgaccctcagggattcctgaccgattctctggctccaagtctggcacgtcagccaccctgcacatcaccggactccagactggggacgaggccgattattactgc

SEQ ID NO: 10542 - DNA, 108 bp, synthetic construct; identical to SEQ ID NO: 1854
  misc_feature 1..108: note = Synthetic construct
  source 1..108: mol_type = other DNA

SEQ ID NO: 10543 - DNA, 108 bp, synthetic construct
  misc_feature 1..108: note = Synthetic construct
  source 1..108: mol_type = other DNA
actttgcagagtggggtcccatcaaagttcagcggcagtggctctgggaccgatttcactctcaccatctccggcctgcagcctgatgattctgcaacttattactgc

SEQ ID NO: 10544 - DNA, 108 bp, synthetic construct
  misc_feature 1..108: note = Synthetic construct
  source 1..108: mol_type = other DNA
actcgaaaatccggggtccctgagcgattcgctgccggcgggtctgacacaaggttctctctcaccatcgcccctgtccagagtgaagacgtggcgacttattactgt

SEQ ID NO: 10545 - DNA, 108 bp, synthetic construct
  misc_feature 1..108: note = Synthetic construct
  source 1..108: mol_type = other DNA
aatttaaaaagtggggtcccatcaaggttcagcggcagtggatctgggacagagttcactctcaccatcagcagcctgcagcctgatgattttgcaacttattactgc

SEQ ID NO: 10546 - DNA, 108 bp, synthetic construct
  misc_feature 1..108: note = Synthetic construct
  source 1..108: mol_type = other DNA
gagcggccctcagggatccctgagcgattctctggctccaactctgggcacacagccactctgaccatcagcgggacccaggctgtggatgaggctgagtattactgt

SEQ ID NO: 10547 - DNA, 108 bp, synthetic construct
  misc_feature 1..108: note = Synthetic construct
  source 1..108: mol_type = other DNA
atcagggccactggcgtctcagacagattcagtggcagggggtctgggacagacttcactctcaccatcagccacgtagagcctgaagattttgcactttattattgt

SEQ ID NO: 10548 - DNA, 108 bp, synthetic construct
  misc_feature 1..108: note = Synthetic construct
  source 1..108: mol_type = other DNA
aacagggccactggcatcccagccaggttcagtggcagtgggtctgggacagacttcactctcaccatcagtagcctggagcctgaagattttgcagtttattactgt

SEQ ID NO: 10549 - DNA, 108 bp, synthetic construct
  misc_feature 1..108: note = Synthetic construct
  source 1..108: mol_type = other DNA
aatcgggactctggggtccctgacagattaagcggcagtggatcaggcactgattttacattgaaaatcagcagggtggaggctaacgataccggaatgtatttttgt

SEQ ID NO: 10550 - DNA, 108 bp, synthetic construct
  misc_feature 1..108: note = Synthetic construct
  source 1..108: mol_type = other DNA
agtttgcaaagtggggtcccattaaggttcagtggcagtgggtctgggacagatttcactctcaccatcagcaatctgcaacctgaagattttgcaacttactactgt

SEQ ID NO: 10551 - DNA, 108 bp, synthetic construct
  misc_feature 1..108: note = Synthetic construct
  source 1..108: mol_type = other DNA
cagcgaccctcaggggtccctgaccgattctctggctcccagtctggcacctcagcctccctggccatcagtgggctccagtctgaggatgagggtttttatttctgt

SEQ ID NO: 10552 - DNA, 108 bp, synthetic construct
  misc_feature 1..108: note = Synthetic construct
  source 1..108: mol_type = other DNA
aaccggccctcagggatctcagagagattatctgcatccaggtcaggaaacacagcctccctgaccattactggactccagcctgaggacgaggctgactattactgc

SEQ ID NO: 10553 - DNA, 108 bp, synthetic construct
  misc_feature 1..108: note = Synthetic construct
  source 1..108: mol_type = other DNA
agtttagagagtggggtcccatcaaggttcagcggcagtggatctgggacagaattcactctcaccatcagcagcctgcagcctgatgattttgcaacttattactgt

SEQ ID NO: 10554 - DNA, 108 bp, synthetic construct
  misc_feature 1..108: note = Synthetic construct
  source 1..108: mol_type = other DNA
gatcggccctcagggatttctgatcgcttctctggctccaggtctggcaacacggcctccctgtccatctctgggctccaggctgttgacgaggctgattactactgc

SEQ ID NO: 10555 - DNA, 108 bp, synthetic construct
  misc_feature 1..108: note = Synthetic construct
  source 1..108: mol_type = other DNA
actagggccactggtgtcccagccaggatcagtggcagtgggtctgggacagagttcactctcaccatcagcagcctgcagtctgaagattttggagtttattactgt

SEQ ID NO: 10556 - DNA, 108 bp, synthetic construct
  misc_feature 1..108: note = Synthetic construct
  source 1..108: mol_type = other DNA
aatcgggcctccggggtccctgacaggttcagtggcaggggatcaggcacagattttatactgacaatcagtagagtggaggctgaggatgttggggtgtacttctgc

SEQ ID NO: 10557 - DNA, 108 bp, synthetic construct
  misc_feature 1..108: note = Synthetic construct
  source 1..108: mol_type = other DNA
accttgcaaagtggggtcccatcaaggttcagcggcagtggatctgggacagattttactctcaccatcaacagcctgcagcctgaagattttgcaacttactattgt

SEQ ID NO: 10558 - DNA, 108 bp, synthetic construct; identical to SEQ ID NO: 1857
  misc_feature 1..108: note = Synthetic construct
  source 1..108: mol_type = other DNA

SEQ ID NO: 10559 - DNA, 108 bp, synthetic construct
  misc_feature 1..108: note = Synthetic construct
  source 1..108: mol_type = other DNA
agtttgcaaagtggggtcccatcaaggttcagcggcagtggatctgggacagaattcactctcacaatcagcagcctgcagcctgaagattttgcaagttattactgt

SEQ ID NO: 10560 - DNA, 108 bp, synthetic construct
  misc_feature 1..108: note = Synthetic construct
  source 1..108: mol_type = other DNA
actttgcagaccggagtcccacctagattcaatggcagtggatctgggacagatttcactctcaccatcagctgcctgcagtctgaagaccttggaacctattactgt

SEQ ID NO: 10561 - DNA, 108 bp, synthetic construct
  misc_feature 1..108: note = Synthetic construct
  source 1..108: mol_type = other DNA
acccgggagtccggggtccctgaccgattcagtggcagcgggtctgggacagatttcactctcaccatcagcagcctgcaggctgaagatgtggccgtttattactgt

SEQ ID NO: 10562 - DNA, 108 bp, synthetic construct
  misc_feature 1..108: note = Synthetic construct
  source 1..108: mol_type = other DNA
aagcggccctcagggatccctgatcgcttctctggctcccagtctggcaacacggcctccctgaccgtctctgggctccaggctgaggatgaggctcattatttctgc

SEQ ID NO: 10563 - DNA, 108 bp, synthetic construct
  misc_feature 1..108: note = Synthetic construct
  source 1..108: mol_type = other DNA
acccgggaatccggggtcccagaccgattcattggcagcgggtctgggacagatttcactctcaccatcagcaccctgcaggctgaagatgtggcggtttatttctgt

SEQ ID NO: 10564 - DNA, 108 bp, synthetic construct
  misc_feature 1..108: note = Synthetic construct
  source 1..108: mol_type = other DNA
actttagaaagtggggtcccatcaagattcagcggcagtggatctgggacagacttcactctcaccatcagcagcctgcagcctgatgattttgcaacttattactgc

SEQ ID NO: 10565 - DNA, 108 bp, synthetic construct
  misc_feature 1..108: note = Synthetic construct
  source 1..108: mol_type = other DNA
agtttacaaagtgacgtcccgccaaggttcagcggcagtggatctgggacagaattcactctcaccatcagcagcctgcagcctgatgattttgcaacttattactgc

SEQ ID NO: 10566 - DNA, 108 bp, synthetic construct
  misc_feature 1..108: note = Synthetic construct
  source 1..108: mol_type = other DNA
actttgcaaagtggggtcccatcaaggttcagtggcagtggatctgggacagatttcactctcaccatcagtagtctgcaacctgaagattttgcaacttactactgt

SEQ ID NO: 10567 - DNA, 108 bp, synthetic construct
  misc_feature 1..108: note = Synthetic construct
  source 1..108: mol_type = other DNA
aatcggccctcagggatccctgagcgattctctggctccaactctggaaacacggccaccctgagcatcagtggggtcgaagccggggatgaggccgactacttctgt

SEQ ID NO: 10568 - DNA, 108 bp, synthetic construct
  misc_feature 1..108: note = Synthetic construct
  source 1..108: mol_type = other DNA
aagcgaccctcaggacttcctgaccgattctctggcgccaagtctggcacgtcagccaccctggccatcaccggactccagactggggacgaggccgattactactgc

SEQ ID NO: 10569 - DNA, 108 bp, synthetic construct
  misc_feature 1..108: note = Synthetic construct
  source 1..108: mol_type = other DNA
aacagggccactggcatcccagacaggttcagtgccagtgggtctgggacagacttcactctcaccatcagcagactggaccctgaagattttgcagtgtattactgt

SEQ ID NO: 10570 - DNA, 108 bp, synthetic construct
  misc_feature 1..108: note = Synthetic construct
  source 1..108: mol_type = other DNA
accagggccactggcatcccagacaggttcggtggcagtgggtctgggacagacttcactctcaccatcagcaaactggagcctgaagattttgcagtgtatttctgt

SEQ ID NO: 10571 - DNA, 108 bp, synthetic construct; identical to SEQ ID NO: 1853
  misc_feature 1..108: note = Synthetic construct
  source 1..108: mol_type = other DNA

SEQ ID NO: 10572 - DNA, 108 bp, synthetic construct
  misc_feature 1..108: note = Synthetic construct
  source 1..108: mol_type = other DNA
aaacggccctcaggggtccctgatcgcttctctggctccaagtctggcaacacggcctccctgaccatctctgacctcctggctgaagatgaggctgactactactgc

SEQ ID NO: 10573 - DNA, 108 bp, synthetic construct
  misc_feature 1..108: note = Synthetic construct
  source 1..108: mol_type = other DNA
aatagggccgctggcgttcccgacagattcagtggcagtgggtctggagcagagttcactctcaccatcaccagactggagcctgaagattttgcagtctatttctgt

SEQ ID NO: 10574 - DNA, 108 bp, synthetic construct
  misc_feature 1..108: note = Synthetic construct
  source 1..108: mol_type = other DNA
actttggggagtggggtcccatccaggtttagtggcagtggttctggggcggattacattctcaccatcaccaccctgcaacctgaggatttcgcttcttattactgt

SEQ ID NO: 10575 - DNA, 108 bp, synthetic construct
  misc_feature 1..108: note = Synthetic construct
  source 1..108: mol_type = other DNA
actttgcaaagtggggtcccaacaaggttcagtggcagtggatctgggacagagttcactctcaccatcagcagtctgcaacctgaagattttgcaacttactactgt

SEQ ID NO: 10576 - DNA, 108 bp, synthetic construct
  misc_feature 1..108: note = Synthetic construct
  source 1..108: mol_type = other DNA
gacagggccactggcatcccagccaggttcagtggcagtgggtctgggacagacttcactctcaccatcagcagcctagagcctgaagattttgcagtttattactgt

SEQ ID NO: 10577 - DNA, 108 bp, synthetic construct
  misc_feature 1..108: note = Synthetic construct
  source 1..108: mol_type = other DNA
gtccggcccccagagatccctgagcgattctctggctccaattctgggaacacggccaccctgaccatcaacagggtcaaagccggggatgaggccgactatttttgt

SEQ ID NO: 10578 - DNA, 108 bp, synthetic construct
  misc_feature 1..108: note = Synthetic construct
  source 1..108: mol_type = other DNA
aagcgaccctcagggattcctgaccgattctctggctccaagtctggcacgtcagccaccctggacatcaccgaaatcctgactggggaccaggccgattattactgc

SEQ ID NO: 10579 - DNA, 108 bp, synthetic construct
  misc_feature 1..108: note = Synthetic construct
  source 1..108: mol_type = other DNA
aagcgaccctcagggattcctgaccgattctctggcgccaagtcaggcacgtcagccaccttggacatcaccggactccagactggggacgaggccgattattactgc

SEQ ID NO: 10580 - DNA, 108 bp, synthetic construct
  misc_feature 1..108: note = Synthetic construct
  source 1..108: mol_type = other DNA
acccgggaatccggggtccctgaccgaatcagtggcaccgggtctgggacagatttcactctcaccatcagtgatctacaggctgcagatgtggcagtttattactgt

SEQ ID NO: 10581 - DNA, 108 bp, synthetic construct
  misc_feature 1..108: note = Synthetic construct
  source 1..108: mol_type = other DNA
aagaggccctcaggactccctgaccgattctctggctccaagtctggcacctcagcctccctggccatcagtgggctccagtctgaggatgaggctgattattactgt

SEQ ID NO: 10582 - DNA, 108 bp, synthetic construct
  misc_feature 1..108: note = Synthetic construct
  source 1..108: mol_type = other DNA
aatttggaaacaggggtcccatcaaggttcagtggacgtggctctgggacactttttacattcaccatcagtagcctgcaggctgaagatattgcaacatattactgt

SEQ ID NO: 10583 - DNA, 108 bp, synthetic construct
  misc_feature 1..108: note = Synthetic construct
  source 1..108: mol_type = other DNA
aagcgaccctcagggatccctgatcgcttctctggctcccagtctggcaacacggcctccctgaccgtctctgggctccaggctgaggatgaggctgattatttctgc

SEQ ID NO: 10584 - DNA, 108 bp, synthetic construct
  misc_feature 1..108: note = Synthetic construct
  source 1..108: mol_type = other DNA
agcagggccactggcatcccagacaggttcagtggcagtgggtctgggacagacttcactctcaccatcagcagactggagcctgaagattttgcagtctatttctgt

SEQ ID NO: 10585 - DNA, 108 bp, synthetic construct
  misc_feature 1..108: note = Synthetic construct
  source 1..108: mol_type = other DNA
agcagggccactggcatccccgacaggttcagtggcagtgggtctgggacagacttcactctcaccatcagcagactggagcctgaagattctgcagtatattactgt

SEQ ID NO: 10586 - DNA, 108 bp, synthetic construct
  misc_feature 1..108: note = Synthetic construct
  source 1..108: mol_type = other DNA
gaccggccctcagggatccctgagcgattctctggctccaactctgggaacacggccaccctgaccatcaccagggtcgaagccggggatgaggccgactattcctgt

SEQ ID NO: 10587 - DNA, 108 bp, synthetic construct
  misc_feature 1..108: note = Synthetic construct
  source 1..108: mol_type = other DNA
aaccggttctctggggtgccagataggttcagtggcagcgggtcagggacagatttcacactgaaaatcagccgggtggaggctgaggatgttggagtttattactgc

SEQ ID NO: 10588 - DNA, 108 bp, synthetic construct
  misc_feature 1..108: note = Synthetic construct
  source 1..108: mol_type = other DNA
agcagggccactggcatcccagacaggttcagtggcagtgggtctgggacagacttcactctcaccatcagcaggctggagcctgaagattttgcagtgtattactgt

SEQ ID NO: 10589 - DNA, 108 bp, synthetic construct
  misc_feature 1..108: note = Synthetic construct
  source 1..108: mol_type = other DNA
accccggcatccggagtccctggccgattcaacggcagcggctccgggacagatttcactctcaccatcaccagtctgcaggctgaagatgtgggcgtctattactgt

SEQ ID NO: 10590 - DNA, 108 bp, synthetic construct
  misc_feature 1..108: note = Synthetic construct
  source 1..108: mol_type = other DNA
actttgcagagtggggtcccatcaaggttcagtggcagtgggtctggggcagatttcactctcaccatcagcagtctgcaacctgaagattttgcgacttactactgt

SEQ ID NO: 10591 - DNA, 108 bp, synthetic construct
  misc_feature 1..108: note = Synthetic construct
  source 1..108: mol_type = other DNA
actttgcaacgtggggtcccatcaaggttcagcgccagtggatctgggacagatttcactctctccatcagcagcctgcagcctgaagattttgcaacttattactgt

SEQ ID NO: 10592 - DNA, 108 bp, synthetic construct
  misc_feature 1..108: note = Synthetic construct
  source 1..108: mol_type = other DNA
aaacgaccctcagggattcctgaccgattctctggctccaagtctggcacgtcagccaccctggacatcaccggactccagactggggacgaggccgactattactgc

SEQ ID NO: 10593 - DNA, 108 bp, synthetic construct
  misc_feature 1..108: note = Synthetic construct
  source 1..108: mol_type = other DNA
aatcggccctcaggagtctctcatcgcttctctggctccaagtctggctacacggcctccctgatcatctcggggctccaggctgaggacgaggctgattatttctgc

SEQ ID NO: 10594 - DNA, 108 bp, synthetic construct
  misc_feature 1..108: note = Synthetic construct
  source 1..108: mol_type = other DNA
aggttggaaagtggagtcccgtcaacgttcagcggcggtggatctgggacagttttcattctcttcatcagcagtatgcagcctgaagattttggaacttactattgt

SEQ ID NO: 10595 - DNA, 108 bp, synthetic construct
  misc_feature 1..108: note = Synthetic construct
  source 1..108: mol_type = other DNA
cagcggctctcaggggtccctgaccgattctctggctccaagtctggcacctcagcctccctggccatcagtgggctccggtccgaggatgaggctgattattactgt

SEQ ID NO: 10596 - DNA, 108 bp, synthetic construct
  misc_feature 1..108: note = Synthetic construct
  source 1..108: mol_type = other DNA
aatcggttctctggagtgccagataggttcagtggcagcgggtcagggacagatttcacactgaaaatcagccgggcggaggctgaggatgtcgggatctattactgc

SEQ ID NO: 10597 - DNA, 108 bp, synthetic construct
  misc_feature 1..108: note = Synthetic construct
  source 1..108: mol_type = other DNA
aagcgaccctcagggattcctgaccgattctctggctccaagtctggcacgtcagccaccctgggcatcaccggactccagactggggacgaggccgcttattactgc

SEQ ID NO: 10598 - DNA, 108 bp, synthetic construct
  misc_feature 1..108: note = Synthetic construct
  source 1..108: mol_type = other DNA
caggggccctcaggggtccctgaccgattctctggctccaagtctggcacctcagcctccctggccatcagtgggctccagtctgaggatgaggctgattattactgt

SEQ ID NO: 10599 - DNA, 108 bp, synthetic construct
  misc_feature 1..108: note = Synthetic construct
  source 1..108: mol_type = other DNA
agcagggccactggcatcccagacaggttcagtggaagtgggtctgggacagacttcactctaatcatcaccacagtagagcccgaagattttgccgtgtattattgt

SEQ ID NO: 10600 - DNA, 108 bp, synthetic construct
  misc_feature 1..108: note = Synthetic construct
  source 1..108: mol_type = other DNA
actctcgttcctggaatcccacctcgattcagtggcagcgggtctggaacagattttaccctcacaattgataacatagaatctgaggattctccttattacttctgc

SEQ ID NO: 10601 - DNA, 108 bp, synthetic construct
  misc_feature 1..108: note = Synthetic construct
  source 1..108: mol_type = other DNA
agtttgcaaagtggggtcccatcaaggttcagtggcagtggatctgggacatatttcactctcaccatcaacagtctgcaacctgaagattttgcagcttactactgt

SEQ ID NO: 10602 - DNA, 108 bp, synthetic construct
  misc_feature 1..108: note = Synthetic construct
  source 1..108: mol_type = other DNA
aaattggaaagtggggtccctcccaggttcagtggcagtggatctggggcgcagtacactctcaccatcaccagcctgcagcctgaagattttgcaacttattactgt

SEQ ID NO: 10603 - DNA, 108 bp, synthetic construct
  misc_feature 1..108: note = Synthetic construct
  source 1..108: mol_type = other DNA
tctttacattcgggggtcccatcgagattcagcggcagtgggtctggggcagagttcactctcacaatcaacggcctacagcctgaagattttgcaacttactactgt

SEQ ID NO: 10604 - DNA, 108 bp, synthetic construct
  misc_feature 1..108: note = Synthetic construct
  source 1..108: mol_type = other DNA
gagaggccctcagggattcctgaacgattctctggctccagctcagggacaacagtcaccttgaccatcactggagtccaggcagaagacgaggctgactattattgt

SEQ ID NO: 10605 - DNA, 108 bp, synthetic construct
  misc_feature 1..108: note = Synthetic construct
  source 1..108: mol_type = other DNA
attttggaaacaggggtctcttcaaggttcagtggcagtggatctgggacaaatttttccttcaccatcaacaactttcagcccgaggacgtggcaacatatgtctgt

SEQ ID NO: 10606 - DNA, 108 bp, synthetic construct
  misc_feature 1..108: note = Synthetic construct
  source 1..108: mol_type = other DNA
agtttgcaaaggggggtcccgtcaaggttcagcggcagtggatctgggacagatttcactctcaccatcagcagcctgcagcctgaagattttgcgacttactattgt

SEQ ID NO: 10607 - DNA, 108 bp, synthetic construct
  misc_feature 1..108: note = Synthetic construct
  source 1..108: mol_type = other DNA
acccgagagtccggggtcccggaccgattcagtgccagcgggtctgggagtgatttcactttgaccatcagcagcctgcaggctgaggatgtggctgtttattattgt

SEQ ID NO: 10608 - DNA, 108 bp, synthetic construct
  misc_feature 1..108: note = Synthetic construct
  source 1..108: mol_type = other DNA
gaccggccctcagggatccctgagcgattctctggcgccaactctgggaacacggccaccctgaccatcagcacggtcgaagccggggatgaggccgactatcactgt

SEQ ID NO: 10609 - DNA, 108 bp, synthetic construct
  misc_feature 1..108: note = Synthetic construct
  source 1..108: mol_type = other DNA
actttgcaaagtggggtcccatcaaggttcagcggcagtggatctgggacagaattcactctcacaatcagcagcctgcagcctgaagattttgcaacttattactgt

SEQ ID NO: 10610 - DNA, 108 bp, synthetic construct
  misc_feature 1..108: note = Synthetic construct
  source 1..108: mol_type = other DNA
aatcggccctcaggggtttcttatcgcttctctggctccaagtctggcaacacggcctccctgaccatctctggcctccaggctgaggacgaggctgattatttctgc

SEQ ID NO: 10611 - DNA, 108 bp, synthetic construct
  misc_feature 1..108: note = Synthetic construct
  source 1..108: mol_type = other DNA
accagggccactggtatcccagccaggttcagtggtagtggatttgggacagagttcactctcaccatcttcaacgtgcagtctgaagattgtgcagtttattactgt

SEQ ID NO: 10612 - DNA, 108 bp, synthetic construct
  misc_feature 1..108: note = Synthetic construct
  source 1..108: mol_type = other DNA
agttttcatggtggggtccctgcaaggttcactggcagtggatctgggacagatttcactctcactatcaacactctgcaacctgaagattttgcaacttactactgc

SEQ ID NO: 10613 - DNA, 108 bp, synthetic construct
  misc_feature 1..108: note = Synthetic construct
  source 1..108: mol_type = other DNA
aacaggcccactggcatcccaggcaggttcagtgccagtgggtctgggacagacttcactctcaccatcagcagcctagagcctgaagattttgcagtttattactgt

SEQ ID NO: 10614 - DNA, 108 bp, synthetic construct
  misc_feature 1..108: note = Synthetic construct
  source 1..108: mol_type = other DNA
aatcggccctcaggggtccctgaccgattctctggctccaagtctgccacctcagcctccctggccatcactgggctccaggctgaggatgaggctgattattactgc

SEQ ID NO: 10615 - DNA, 108 bp, synthetic construct
  misc_feature 1..108: note = Synthetic construct
  source 1..108: mol_type = other DNA
gatcggccctcagggatttctaatcgcttctctggctccaagtctggcaacacggcctccctgaccatctctgggctccaggctgacgacgaggctgattattactgc

SEQ ID NO: 10616 - DNA, 108 bp, synthetic construct
  misc_feature 1..108: note = Synthetic construct
  source 1..108: mol_type = other DNA
aatcggccctcagggatcccagaccgattcattggctccgcctcaggaagcacagcttacttgatcatcaataacattgaggcggacgatgaggctgactattattgt

SEQ ID NO: 10617 - DNA, 98 bp, synthetic construct
  misc_feature 1..98: note = Synthetic construct
  source 1..98: mol_type = other DNA
gagggatcccagaccgattcattggctccgcctcaggaagcacagcttacttgatcatcaataacattgaggcggacgatgaggctgactattattgt

SEQ ID NO: 10618 - DNA, 108 bp, synthetic construct
  misc_feature 1..108: note = Synthetic construct
  source 1..108: mol_type = other DNA
aacagggccactggcatcccagccaggttcggtggcagtgggtctgggacagacttcactctcaccatcagcagcctagagcctggagactttgcagtttattactgt

SEQ ID NO: 10619 - DNA, 108 bp, synthetic construct
  misc_feature 1..108: note = Synthetic construct
  source 1..108: mol_type = other DNA
agtttgcagggtggggtcccatcgaggttcagcggcggtggatctgggacagaattcactctcaccatcagcagcctgcagcctgaagattccgcaatttactattgt

SEQ ID NO: 10620 - DNA, 108 bp, synthetic construct
  misc_feature 1..108: note = Synthetic construct
  source 1..108: mol_type = other DNA
cagtccatctcaggggtcccctcgaggttcagtggcagtggatctgggacagatttcaccctcagcatcaatagcctggaagctgaagatgctgcaacgtattactgt

SEQ ID NO: 10621 - DNA, 108 bp, synthetic construct
  misc_feature 1..108: note = Synthetic construct
  source 1..108: mol_type = other DNA
agcagggccactggcatcccagacaggttcagtggcagtgggtctgggacagacttcactctcaccatcaacagactggagcctgaagattttgcattttattactgt

SEQ ID NO: 10622 - DNA, 108 bp, synthetic construct
  misc_feature 1..108: note = Synthetic construct
  source 1..108: mol_type = other DNA
attttgcaaaatggggtcccctcaaggttcagtggcagtgggtctgggacagatttctctctcaccatcagcagtctccaacctgaagattttgcaacttactactgt

SEQ ID NO: 10623 - DNA, 108 bp, synthetic construct
  misc_feature 1..108: note = Synthetic construct
  source 1..108: mol_type = other DNA
ggtttagaaactggagtcccatccaggttcagcggcagtggatctgggaccgaattcactctcaccatcaacagcctgcagcctgatgattttgcaacttattactgc

SEQ ID NO: 10624 - DNA, 108 bp, synthetic construct
  misc_feature 1..108: note = Synthetic construct
  source 1..108: mol_type = other DNA
acgagggccactggtatcccagccaggttcagtggcagtgggtctgggacagagttcactctcaccatcagcagcctgcagtctgaagattttgcagtttattactgt

SEQ ID NO: 10625 - DNA, 108 bp, synthetic construct
  misc_feature 1..108: note = Synthetic construct
  source 1..108: mol_type = other DNA
aggagggccattgacatcccagacaggttcaggggcactgggtctgggacagacttcactctcaccatcagcagactgcaacctgaagattttgcagtgtatttctgt

SEQ ID NO: 10626 - DNA, 108 bp, synthetic construct
  misc_feature 1..108: note = Synthetic construct
  source 1..108: mol_type = other DNA
agattggagagtggggtcccatccaggttcagcggcagtggatctgggacggattacactctcaccatcagcaccctgcagcctgaagattttgcaacttatttctgt

SEQ ID NO: 10627 - DNA, 114 bp, synthetic construct
  misc_feature 1..114: note = Synthetic construct
  source 1..114: mol_type = other DNA
ggccagggctctggagtccccagccgcttctctgcgtccaaagatgcttcagccaatacagggattttactcatctccgggctccagtctgaggatgaggctgactattactgt

SEQ ID NO: 10628 - DNA, 108 bp, synthetic construct
  misc_feature 1..108: note = Synthetic construct
  source 1..108: mol_type = other DNA
aatttggaaacaggggtcccatcaaggttcagtggaggtggttctgggacacattttactttcaacataagcagcctgcagcctgaagatattggaacatattactgt

SEQ ID NO: 10629 - DNA, 108 bp, synthetic construct
  misc_feature 1..108: note = Synthetic construct
  source 1..108: mol_type = other DNA
actttacaagttggggtcccatccaggttcagcggcgatggatttgggacagatttcacgctcaccatcagcagcctgcagcctgaagattccgcaacttactattgt

SEQ ID NO: 10630 - DNA, 108 bp, synthetic construct
  misc_feature 1..108: note = Synthetic construct
  source 1..108: mol_type = other DNA
aacagggccactggcatccccgccaggttcagtggcagtgggtttgggacagacttcactctcaccatcagcagcctagagcctgacgattttgctgtttattactgt

SEQ ID NO: 10631 - DNA, 108 bp, synthetic construct
  misc_feature 1..108: note = Synthetic construct
  source 1..108: mol_type = other DNA
aagcgctccccagggactcctgaccgaatccatggcttccggtctggcacgtcagccagagtggccatcaccgacctccaaactggggacgaggccgactattactgc

SEQ ID NO: 10632 - DNA, 108 bp, synthetic construct
  misc_feature 1..108: note = Synthetic construct
  source 1..108: mol_type = other DNA
atccgggaatccggggtccctgaccgattcagtggcagcgggtctgggacagatttcactctcaccatcagcagcctgcaggctgaagatgtggcaatttattactgt

SEQ ID NO: 10633 - DNA, 108 bp, synthetic construct
  misc_feature 1..108: note = Synthetic construct
  source 1..108: mol_type = other DNA
cagcggccctcaggggtccctgaccgattctctggctccaagtctggcatctcagcctccctggccatcagtgggctccaggctgaggatgaggctgattattactgt

SEQ ID NO: 10634 - DNA, 108 bp, synthetic construct
  misc_feature 1..108: note = Synthetic construct
  source 1..108: mol_type = other DNA
ctgcggccctcaggggtccctgaccgattctctggctccaagtctggcacctcagcctccctggccatcagtggcctccagtctggagatgaggctgattatttctgt

SEQ ID NO: 10635 - DNA, 108 bp, synthetic construct
  misc_feature 1..108: note = Synthetic construct
  source 1..108: mol_type = other DNA
agtttgcaaagtggggtcccatcaaggttcagcggcagtggatctgggacagatttcactctcaccatcagcagcctgcagcctgaagattttgcaacttactattgt

SEQ ID NO: 10636 - DNA, 108 bp, synthetic construct
  misc_feature 1..108: note = Synthetic construct
  source 1..108: mol_type = other DNA
agtttccaaagtggggtcccatcaaggttcagtggcagttcatctgggacagatttcactctcaccatcaccagtctgcaacctgaagactttgcaacttactactgt

SEQ ID NO: 10637 - DNA, 108 bp, synthetic construct
  misc_feature 1..108: note = Synthetic construct
  source 1..108: mol_type = other DNA
gaccggccctcagggatccctgagcgattttccggctccaattctgggaacacggccaccctgatcatctccagggtcgaagccggggatgaggccgactatttttgt

SEQ ID NO: 10638 - DNA, 108 bp, synthetic construct
  misc_feature 1..108: note = Synthetic construct
  source 1..108: mol_type = other DNA
aagcgaccctcagggactcctgaccgagtccacggcttcaggtctggcacgtcagccaggttggtcatcaccgaactccacactggggacgaggccgattattactgc

SEQ ID NO: 10639 - DNA, 108 bp, synthetic construct
  misc_feature 1..108: note = Synthetic construct
  source 1..108: mol_type = other DNA
acattggaaagtggggtcccatccaggttcagtggcagtggatctgggacggattacactctcaccatcaccagcctgcagcctgaagatttagcgacttattattgt

SEQ ID NO: 10640 - DNA, 108 bp, synthetic construct
  misc_feature 1..108: note = Synthetic construct
  source 1..108: mol_type = other DNA
accagggccactggcatcccagacaggttcagtggcagtgggtctgagacagacttcactctcaccatcagcagcctggagcctgaagattttgcagtgtatcactgt

SEQ ID NO: 10641 - DNA, 108 bp, synthetic construct
  misc_feature 1..108: note = Synthetic construct
  source 1..108: mol_type = other DNA
aatcgggcctccggggtccctgacaggttcagtggcgctggatcaggcacagatttcacactgaaaatcaacagcgtggagcctggcgacgtggggatttatttctgc

SEQ ID NO: 10642 - DNA, 108 bp, synthetic construct
  misc_feature 1..108: note = Synthetic construct
  source 1..108: mol_type = other DNA
actttgcaaaacggggtcccatcaaagttcagtggcagtggatctgggacagatttcactctcaccatcatcggtctgcaacctgacgattttgcgacttactactgt

SEQ ID NO: 10643 - DNA, 108 bp, synthetic construct
  misc_feature 1..108: note = Synthetic construct
  source 1..108: mol_type = other DNA
aatcggccctcagggatttctaatcgcttctctggctccaagtctggcaacacggcctccctgactatctctgggctccaggctgaggacgaggctgcttattactgc

SEQ ID NO: 10644 - DNA, 108 bp, synthetic construct
  misc_feature 1..108: note = Synthetic construct
  source 1..108: mol_type = other DNA
aatcgggcctccggggtccctgacagattcagtggcagtggatcaggcacagattttacactgaaaatcagcagagtggaggctgaggatgttggggtttattactgc

SEQ ID NO: 10645 - DNA, 108 bp, synthetic construct
  misc_feature 1..108: note = Synthetic construct
  source 1..108: mol_type = other DNA
aagcgaccctcagggattcctgaccgattctctggctccaagtctggcacgtcagccaccctgggcatcaccggactccagactggggacgaggccgattattactgc

SEQ ID NO: 10646 - DNA, 62 bp, synthetic construct
  misc_feature 1..62: note = Synthetic construct
  source 1..62: mol_type = other DNA
gcaacacggcctccctgaccatctctgggctccaggctgacgacgaggctgattattactgc

SEQ ID NO: 10647 - DNA, 108 bp, synthetic construct
  misc_feature 1..108: note = Synthetic construct
  source 1..108: mol_type = other DNA
aatttgcaaagtggggtcccatcaaggttcagtggcagtggatctgggacagatttcactctcaccatcagcagtctgcaacctgaagattttgcaacttactactgt

SEQ ID NO: 10648 - DNA, 108 bp, synthetic construct
  misc_feature 1..108: note = Synthetic construct
  source 1..108: mol_type = other DNA
aatttggatgtcggggccccatcgaggttcagcggaagtggatccgggacagagttcactttcaccatcaataacctgcagcctgatgatgttgcaatttattactgt

SEQ ID NO: 10649 - DNA, 108 bp, synthetic construct
  misc_feature 1..108: note = Synthetic construct
  source 1..108: mol_type = other DNA
actttgcaaagtggggtcccatcaaggtttagcggcagtggatctgggacagatttcactctcaccatcagctgcctgcagtctgaggatttcgcaacttattactgt

SEQ ID NO: 10650 - DNA, 108 bp, synthetic construct
  misc_feature 1..108: note = Synthetic construct
  source 1..108: mol_type = other DNA
acccgggaatccggggtccttgaccgattcagtggcagcgggtctgggacagatttcactctcaccatcagcagccttcaggctgaagatgtggcagtttattactgt

SEQ ID NO: 10651 - DNA, 108 bp, synthetic construct
  misc_feature 1..108: note = Synthetic construct
  source 1..108: mol_type = other DNA
aacagggccactggcatcccagccaggttcagtggcagtgggtctgggacagacttcactctcaccatcagcagcctcgagcctgaagatttcgcagtttattactgt

SEQ ID NO: 10652 - DNA, 108 bp, synthetic construct
  misc_feature 1..108: note = Synthetic construct
  source 1..108: mol_type = other DNA
tctttagaaaatggggtcccatcaagattcagcggcagtgggtctgggacagaatttactctcaccatcagcagcctgcaggctgatgattttgcaacttattattgc

SEQ ID NO: 10653 - DNA, 108 bp, synthetic construct
  misc_feature 1..108: note = Synthetic construct
  source 1..108: mol_type = other DNA
actttgcaaagtggggtcccatcaaggttcagcggcggtggatctgggacaaatttcactctcaccatcaactgcctgcagtctgaagattttgcaacatattactgt

SEQ ID NO: 10654 - DNA, 108 bp, synthetic construct
  misc_feature 1..108: note = Synthetic construct
  source 1..108: mol_type = other DNA
agcagggccactggcatcccagacaggttcagtggcagtgggtctgggacagacttcactctcaccatcagcagactggagcctgaagattctgcagtatattactgt

SEQ ID NO: 10655 - DNA, 108 bp, synthetic construct
  misc_feature 1..108: note = Synthetic construct
  source 1..108: mol_type = other DNA
actttgcaatatggggtcccatcaaggttcagcggtagtggatctgggacagaattcactctcacaatcagcagcctgcagcctgaagattttgcaacttattactgt

SEQ ID NO: 10656 - DNA, 108 bp, synthetic construct
  misc_feature 1..108: note = Synthetic construct
  source 1..108: mol_type = other DNA
acccgggaatccggggtccctgcccgattcagtggcagcgggtctgggacagatttcactctcaccatcagcagcctgcaggctgaagatgtggcagtgtattactgt

SEQ ID NO: 10657 - DNA, 108 bp, synthetic construct
  misc_feature 1..108: note = Synthetic construct
  source 1..108: mol_type = other DNA
aacaagggggacgggatccctggtcgcttctcaggctccagctctggggctgagcgctacctcaccatctccagcctccagtctgaggatgaagctgactattattgt

SEQ ID NO: 10658 - DNA, 108 bp, synthetic construct
  misc_feature 1..108: note = Synthetic construct
  source 1..108: mol_type = other DNA
aatcggccctcaggggtccctgaccgaatctctggctccaagtctggcacctcagcctccctggccatcgctgggctccaacctgcggatgaggctgattattactgt

SEQ ID NO: 10659 - DNA, 108 bp, synthetic construct
  misc_feature 1..108: note = Synthetic construct
  source 1..108: mol_type = other DNA
accagggccactggtatcccagccaggttcagtggcagtgggtctgggacagagttcactctcaccatcagcagcctgcagtctgaagattttgcagtttactactgt

SEQ ID NO: 10660 - DNA, 108 bp, synthetic construct
  misc_feature 1..108: note = Synthetic construct
  source 1..108: mol_type = other DNA
ctcagggcccctggcatcccagccaggttcagtggcagtgggtctgggacagacttcactctcatcatcaacaacctcgagcctgaagattttgcgatttattcctgt

SEQ ID NO: 10661 - DNA, 108 bp, synthetic construct
  misc_feature 1..108: note = Synthetic construct
  source 1..108: mol_type = other DNA
agtttggaaagtggggtcccatcaaggttcagcggcagtggatctgggacagagttcactctcaccatcagcagcctgcagcctgaggattttgcaatttattactgt

SEQ ID NO: 10662 - DNA, 108 bp, synthetic construct
  misc_feature 1..108: note = Synthetic construct
  source 1..108: mol_type = other DNA
aacaaacactcctggacccctgcccggttctcaggctccctccttgggggcaaagctgccctgacactgtcaggtgtgcagcctgaggacgaggctgagtattactgc

SEQ ID NO: 10663 - DNA, 108 bp, synthetic construct
  misc_feature 1..108: note = Synthetic construct
  source 1..108: mol_type = other DNA
agtttagaaactggggtcccatcaaggttcagcggcagtggatctgggacagaattcactctcaccatcagcagcctgcagcctgatgattttgcaacttattactgc

SEQ ID NO: 10664 - DNA, 108 bp, synthetic construct
  misc_feature 1..108: note = Synthetic construct
  source 1..108: mol_type = other DNA
actttagaaagtggggtcccatcaaggttcagcggcagtgcatctgagacagaattcactctcaccatcagcagcctgcagcctgatgattttgcaacttattattgc

SEQ ID NO: 10665 - DNA, 108 bp, synthetic construct
  misc_feature 1..108: note = Synthetic construct
  source 1..108: mol_type = other DNA
aacagggccactggcatcccagacaggttcagtggcagtgggtctgggacagacttcactctcaccatcagcaggctggagcctgaagattttgcagtgtattactgt

SEQ ID NO: 10666 - DNA, 108 bp, synthetic construct
  misc_feature 1..108: note = Synthetic construct
  source 1..108: mol_type = other DNA
aaccggccctcagggatcccagaccgattctctggctccacttcaggaaacacagcttccttgaccatcactggggctcaggcggaagatgaggctgactattattgt

SEQ ID NO: 10667 - DNA, 108 bp, synthetic construct
  misc_feature 1..108: note = Synthetic construct
  source 1..108: mol_type = other DNA
aatttgcagacaggggtcccatcaaggttcagtggaagtggatctgggacagattttactttcaccatcagcagcctgcagcctgaagatattgcaacatattactgt

SEQ ID NO: 10668 - DNA, 108 bp, synthetic construct
  misc_feature 1..108: note = Synthetic construct
  source 1..108: mol_type = other DNA
actttgcaaagtggggtcccaccaaggttcagtggcagtggatctgggacaaatttcactctcaccatcaccaatctgcaacctgaagattttgcaacttactactgt

SEQ ID NO: 10669 - DNA, 108 bp, synthetic construct
  misc_feature 1..108: note = Synthetic construct
  source 1..108: mol_type = other DNA
agtttagaaagtggggtcccatcaaggttcagcggcagtggatctgggacagaattcactctcaccatcagcagcctgcagcctgatgattttgtgacttattactgc

SEQ ID NO: 10670 - DNA, 108 bp, synthetic construct
  misc_feature 1..108: note = Synthetic construct
  source 1..108: mol_type = other DNA
agtttgcaaagtggggtcccatcaaggttcagtggcagtggatttgggacagatttcactctcaccatcagcagtctgcaacctgaagattttgcaacttactactgt

SEQ ID NO: 10671 - DNA, 108 bp, synthetic construct
  misc_feature 1..108: note = Synthetic construct
  source 1..108: mol_type = other DNA
caccggccctcagggatccctgagcgattctctggctccaattctgactccacggccacccttagcatcagcagtgtcgaggcctgggatgaggccgactattactgc

SEQ ID NO: 10672 - DNA, 108 bp, synthetic construct
  misc_feature 1..108: note = Synthetic construct
  source 1..108: mol_type = other DNA
actttgaaaagtggggtcccatcaaggttcagtggcagtggatctgggacagagttcactctcaccatcagcagtctgcaacctgaagattttgcaacttactattgt

SEQ ID NO: 10673 - DNA, 108 bp, synthetic construct
  misc_feature 1..108: note = Synthetic construct
  source 1..108: mol_type = other DNA
agtttgcgaagtggggtcccgtcaaggttcagtggcagtggatctgggacagatttcactctcaccatcagcagtctgcaacctgaagattttgcagcttactactgt

SEQ ID NO: 10674 - DNA, 108 bp, synthetic construct
  misc_feature 1..108: note = Synthetic construct
  source 1..108: mol_type = other DNA
cagcggccctcagggatttctgatcgcttctctggctccaagtctggcaacacggcctccctgacaatctctgggctccaggctgaggacgaggctgattatttctgc

SEQ ID NO: 10675 - DNA, 108 bp, synthetic construct
  misc_feature 1..108: note = Synthetic construct
  source 1..108: mol_type = other DNA
aacagggccactggcatcccagccagattcggtggcagtgggtctgggacagacttcattctcaccatcagcagcctagagcctgaagattttgcagtgtattactgt

SEQ ID NO: 10676 - DNA, 108 bp, synthetic construct
  misc_feature 1..108: note = Synthetic construct
  source 1..108: mol_type = other DNA
aagcgcccctcagggatccctgagcgaatctctggctccaactctgggaacacagccactctgaccatcaccggggcccaggctatggatgaggctgactattactgt

SEQ ID NO: 10677 - DNA, 108 bp, synthetic construct
  misc_feature 1..108: note = Synthetic construct
  source 1..108: mol_type = other DNA
acccgggaatccggggtccctgaccgattcagtggcagcgggtctggagtgaatttcactctcaccatcagcagcctgcaggctacagatgtggcagtttattactgt

SEQ ID NO: 10678 - DNA, 108 bp, synthetic construct
  misc_feature 1..108: note = Synthetic construct
  source 1..108: mol_type = other DNA
cagcggccctcaggggtccctgcccgattctctggctccaagtttggcacctcagcctccctggccatcagtgggctccggtctgcggatgaggctgtttatttctgt

SEQ ID NO: 10679 - DNA, 108 bp, synthetic construct
  misc_feature 1..108: note = Synthetic construct
  source 1..108: mol_type = other DNA
aagcgaccctcagggattcctgaccgattctctggctccaagtctggcacgtcagccaccctggaaatcagcggactccagcctggggacgaggccgattattattgc

SEQ ID NO: 10680 - DNA, 108 bp, synthetic construct
  misc_feature 1..108: note = Synthetic construct
  source 1..108: mol_type = other DNA
actttgcaaagtggggtcccatcaaggttcagcggcagtggatctgggacagatttcactctcaccatcagcagcctgcagcctgaagatgttgcaacttattactgt

SEQ ID NO: 10681 - DNA, 108 bp, synthetic construct
  misc_feature 1..108: note = Synthetic construct
  source 1..108: mol_type = other DNA
agtttgcaaagtggggtcccgtcaaggttcagtggcagtggatctgggacagatttcactctcaccatcagcagtctgcaacctgaagattttgcaaccttctactgt

SEQ ID NO: 10682 - DNA, 108 bp, synthetic construct
  misc_feature 1..108: note = Synthetic construct
  source 1..108: mol_type = other DNA
accagggccactggcatctcagacaggttcagtggccgtgggtctgggacagacttcactctcaccatcagcagactggagcctgaagattttgcagtgtattactgt

SEQ ID NO: 10683 - DNA, 108 bp, synthetic construct
  misc_feature 1..108: note = Synthetic construct
  source 1..108: mol_type = other DNA
actttagaaactggggtcccatcgaggttcatcggcagtggatctgggacagagttcactctgaccatcagcagcctacagcctgatgattttgcaatttattactgc

SEQ ID NO: 10684 - DNA, 108 bp, synthetic construct
  misc_feature 1..108: note = Synthetic construct
  source 1..108: mol_type = other DNA
agtttgcagagtggggtcccatcaaggttcagtggcagtggatctgggacagatttcactctcaccatcagcaatctgcaacctgaggactttgcaacttactactgt

SEQ ID NO: 10685 - DNA, 108 bp, synthetic construct
  misc_feature 1..108: note = Synthetic construct
  source 1..108: mol_type = other DNA
atcagggcctctggcatcccagacaggttcagtggcagtgggtctgggatcgacttcactctcaccatcaacagactggagcctgaggattttgcagtgtatcactgt

SEQ ID NO: 10686 - DNA, 108 bp, synthetic construct
  misc_feature 1..108: note = Synthetic construct
  source 1..108: mol_type = other DNA
aaacggccctcaggggtccctgaccgattctctggctccaagtctggcacctcagcctccctggccatcactgggctccaggctgaggatgaggctgtttattactgc

SEQ ID NO: 10687 - DNA, 108 bp, synthetic construct
  misc_feature 1..108: note = Synthetic construct
  source 1..108: mol_type = other DNA
agtttgcaaaatggggtcccatcaaagttcagtggcagtggatctgggacagattttactctcaccatcagcggtctacaacctgaggattttgcgacttactactgt

SEQ ID NO: 10688 - DNA, 108 bp, synthetic construct
  misc_feature 1..108: note = Synthetic construct
  source 1..108: mol_type = other DNA
tccagggccgctgacatcccgtccaggttcagtggcagtgggtctgggacagaattcactctcaccatcagcagcctgcagtctgaagattctgcagtttactactgc

SEQ ID NO: 10689 - DNA, 108 bp, synthetic construct
  misc_feature 1..108: note = Synthetic construct
  source 1..108: mol_type = other DNA
aagcgggacgctggggtcccagacagattcgacggcagtgggtcaggcactgacttcacactgaagatcaatagggtggaggctgaggatcttggaatttattactgc

SEQ ID NO: 10690 - DNA, 108 bp, synthetic construct
  misc_feature 1..108: note = Synthetic construct
  source 1..108: mol_type = other DNA
aacagggccactggcatcccagcccggttcagtggcagtgggtctgggacagacttcactctcaccatcagtagcctagagtctgaagattttgcaatttactactgt

SEQ ID NO: 10691 - DNA, 108 bp, synthetic construct
  misc_feature 1..108: note = Synthetic construct
  source 1..108: mol_type = other DNA
aatcggccctcaggaatttctgatcgcttctctgcctccaagtctggcaatacggcctccctgaccatctctgggctccagattgaggacgagggggactatagttgc

SEQ ID NO: 10692 - DNA, 108 bp, synthetic construct
  misc_feature 1..108: note = Synthetic construct
  source 1..108: mol_type = other DNA
caccggccctcagggatccctgagcgattctctggctccaattctgactccacggccacccttagcatcagcagtgtcgaggccggggatgaggccgactattactgc

SEQ ID NO: 10693 - DNA, 108 bp, synthetic construct
  misc_feature 1..108: note = Synthetic construct
  source 1..108: mol_type = other DNA
actcgggagtccggggtccctgaccgattcagtggcagcgggtctgggacagatttcactctcaccatcagcagcctgcaggctgaggatgtggcagtttatttctgt

SEQ ID NO: 10694 - DNA, 108 bp, synthetic construct
  misc_feature 1..108: note = Synthetic construct
  source 1..108: mol_type = other DNA
gagcggccctcagggatccctgagcgattctctggctccaactctgggaacacagccactctgaccatcagcgggacccaggctatggatgaggctgactattactgt

SEQ ID NO: 10695 - DNA, 108 bp, synthetic construct
  misc_feature 1..108: note = Synthetic construct
  source 1..108: mol_type = other DNA
acccggcccactgacatcccagacaggttcagtggcagtgggtctgggacagacttcactctcaccatcagcagactggagcctgaagattttgcaacatattactgt

SEQ ID NO: 10696 - DNA, 108 bp, synthetic construct
  misc_feature 1..108: note = Synthetic construct
  source 1..108: mol_type = other DNA
aatcggccctcaggggtccctgaccgagtctctgagtccaagtctggcacctcagcctccctggccatcactgggctccaggctgaggatgaggctgattattattgc

SEQ ID NO: 10697 - DNA, 108 bp, synthetic construct
  misc_feature 1..108: note = Synthetic construct
  source 1..108: mol_type = other DNA
agtttgcaaagtggggtcccatcaagattcagtggcagtggatctgggacagatttcactctcaccatcagcagtctgcaacctgaagattttgcaacttactactgt

SEQ ID NO: 10698 - DNA, 108 bp, synthetic construct
  misc_feature 1..108: note = Synthetic construct
  source 1..108: mol_type = other DNA
agtttacaaagtggggtcccatcaaggttcagcggcagtggatctggcacagaattcactctcaccatcagcagcctgcagcctgaagattttgcaacttattactgt

SEQ ID NO: 10699 - DNA, 108 bp, synthetic construct
  misc_feature 1..108: note = Synthetic construct
  source 1..108: mol_type = other DNA
agtttgcaaagtggggtcccatcaaggttcagtggcagtggatctgggacagatttcactctcaccatcagcagtctgcaacctgaagattttgcaacttacttctgt

SEQ ID NO: 10700 - DNA, 108 bp, synthetic construct
  misc_feature 1..108: note = Synthetic construct
  source 1..108: mol_type = other DNA
aacacggccactggtttcccagccaggttcagtggcagtgggtctgggacagagttcactctcaccatcagcagcctgcagtctgaagattttgccgtttattactgt

SEQ ID NO: 10701 - DNA, 108 bp, synthetic construct
  misc_feature 1..108: note = Synthetic construct
  source 1..108: mol_type = other DNA
aaccggccctcagggatccctgagcgattctctggctccaacccagggaataccgccaccctaaccatcagcaggatcgaggctgggggtgagactgactattactgt

SEQ ID NO: 10702 - DNA, 108 bp, synthetic construct
  misc_feature 1..108: note = Synthetic construct
  source 1..108: mol_type = other DNA
agagtggaaagtggggtcccatccaggttcagtggcagtggatctgggacggattacactctcaccatcagcagcctgcagcctgaagattttgcaacttattactgt

SEQ ID NO: 10703 - DNA, 108 bp, synthetic construct
  misc_feature 1..108: note = Synthetic construct
  source 1..108: mol_type = other DNA
gaccggccctcagggatccctgcgcgaatctctggctccaactctggaaacatggccaccctgaccatcagcggggtcgaagccggggatgaggccgactattattgt

SEQ ID NO: 10704 - DNA, 108 bp, synthetic construct
  misc_feature 1..108: note = Synthetic construct
  source 1..108: mol_type = other DNA
aatcgaccctcaggggtccctgaccgattctctggctccaagtctggcacctcagcctccctggccatcactgggctccaggctgaggatgaggctgattattactgc

SEQ ID NO: 10705 - DNA, 108 bp, synthetic construct
  misc_feature 1..108: note = Synthetic construct
  source 1..108: mol_type = other DNA
atgcgaccctcactgattcctgaccgattctctgcctctaagtccggcacgtcagccaccctggacatcaccggactccagactggggacgaggccgattattactgc

SEQ ID NO: 10706 - DNA, 108 bp, synthetic construct
  misc_feature 1..108: note = Synthetic construct
  source 1..108: mol_type = other DNA
agcagggccactggcatcccagacaggttcagtggcagtgggtctgggaccgacttcactctcaccatcagcagactggagcctgaagattttgcagtgtattactgt

SEQ ID NO: 10707 - DNA, 108 bp, synthetic construct
  misc_feature 1..108: note = Synthetic construct
  source 1..108: mol_type = other DNA
agccggttctctggagtgccagataggttcagtggcagcgggtcagggacagatttcacactgaaaatcagccgggtggaggctgaggatgttggggtttattactgc

SEQ ID NO: 10708 - DNA, 108 bp, synthetic construct
  misc_feature 1..108: note = Synthetic construct
  source 1..108: mol_type = other DNA
accagggccactggtatcccagccaggttcagtggcagtgggtctgggacagagttcactctcaccatcagcggcctgcagtctgaagattttgcagtttatttctgt

SEQ ID NO: 10709 - DNA, 108 bp, synthetic construct
  misc_feature 1..108: note = Synthetic construct
  source 1..108: mol_type = other DNA
aagcggccctcaggggtttctaatcgcttctctggctccaagtctggcaacacggcctccctgacaatctctggactccaggctgaggacgaggctgattattactgc

SEQ ID NO: 10710 - DNA, 108 bp, synthetic construct
  misc_feature 1..108: note = Synthetic construct
  source 1..108: mol_type = other DNA
aatcggcccttaggggtttctaatcgcttctctggctccaagtctggcaacacggcctccctgaccatctctgggctccggactgaggacgaggctgattattattgc

SEQ ID NO: 10711 - DNA, 108 bp, synthetic construct
  misc_feature 1..108: note = Synthetic construct
  source 1..108: mol_type = other DNA
cagcggccctcaggggtccctgcccgattctctggctccaagtctggcgcgtccgcctccctgaccatcagtgggctccaggctgaggatgaggctgattattattgt

SEQ ID NO: 10712 - DNA, 108 bp, synthetic construct
  misc_feature 1..108: note = Synthetic construct
  source 1..108: mol_type = other DNA
agtttgcaaagtggggtcccttcaaggttccgtggcagtggctctgggacagatttcactctcaccattaccagtctccaacctgaagattttgcaacttactactgt

SEQ ID NO: 10713 - DNA, 33 bp, synthetic construct
  misc_feature 1..33: note = Synthetic construct
  source 1..33: mol_type = other DNA
ctccaggctgacgacgaggctgattattactgc

SEQ ID NO: 10714 - DNA, 108 bp, synthetic construct
  misc_feature 1..108: note = Synthetic construct
  source 1..108: mol_type = other DNA
gagaggccctcagggatccctgagcgattctctggctccagctcagggacaacagtcacgttgaccatcagcggagtccaggcagaagacgaggctgactatttctgt

SEQ ID NO: 10715 - DNA, 108 bp, synthetic construct
  misc_feature 1..108: note = Synthetic construct
  source 1..108: mol_type = other DNA
aacagggccactggcatcccagccaggttcagtggcagtgggtctgggacagacttcactctcaccatcagcagtctagagcctgaagattttgcagtttattactgt

SEQ ID NO: 10716 - DNA, 108 bp, synthetic construct
  misc_feature 1..108: note = Synthetic construct
  source 1..108: mol_type = other DNA
aatcggccctcaggggtttctcatcgcttctctggctccaagtctggaaacacggcctccctgaccatctctggactccaggctgaggacgaggctgattatttctgc

SEQ ID NO: 10717 - DNA, 108 bp, synthetic construct
  misc_feature 1..108: note = Synthetic construct
  source 1..108: mol_type = other DNA
actttagaaagtggggtcccatcgaggttcagcggcagtggatctgggacagaattcactctcaccatcagcagcctgcagcctgatgattttgcaacttattactgc

SEQ ID NO: 10718 - DNA, 108 bp, synthetic construct
  misc_feature 1..108: note = Synthetic construct
  source 1..108: mol_type = other DNA
aacagggccactgacatcccagacaggttcagtggcagtgggtctgggacagacttcactctcaccatcagcagactggagcctgaagattttgcagtgtatttctgt

SEQ ID NO: 10719 - DNA, 108 bp, synthetic construct
  misc_feature 1..108: note = Synthetic construct
  source 1..108: mol_type = other DNA
gagaggcccccagggatccctgagcgattctctggctccagctctgggacaacagtcacattgaccatcagtggagtccaggcagaagacgaggctgactactactgt

SEQ ID NO: 10720 - DNA, 108 bp, synthetic construct
  misc_feature 1..108: note = Synthetic construct
  source 1..108: mol_type = other DNA
agcagggccagtggcgtcccagacaggttcggtggcagtgggtctgggacagacttcactctcagcatcagcagactggagcctgaagattatgcagtgtattactgt

SEQ ID NO: 10721 - DNA, 108 bp, synthetic construct
  misc_feature 1..108: note = Synthetic construct
  source 1..108: mol_type = other DNA
actttgcagagtggggtcccatcaaggttcagcggcagtggatctgggacagaattcactctcacgatcagcagcctgcagcctgaagactatgcaacttattactgt

SEQ ID NO: 10722 - DNA, 108 bp, synthetic construct
  misc_feature 1..108: note = Synthetic construct
  source 1..108: mol_type = other DNA
aagcgaccctcagggattcctgaccgattctctggctccaagtctggcacgtcagccaccctgggcatcagcggactccagactggggacgaggccgattattactgc

SEQ ID NO: 10723 - DNA, 108 bp, synthetic construct
  misc_feature 1..108: note = Synthetic construct
  source 1..108: mol_type = other DNA
accttacagcgtggagtcccatcacggttcagcggcagtgcatctgggacagacttcactctcacaatcagcagcctgcagcctgaagattttgcaacttattattgt

SEQ ID NO: 10724 - DNA, 108 bp, synthetic construct
  misc_feature 1..108: note = Synthetic construct
  source 1..108: mol_type = other DNA
cagcggccctcaggggtttctaatcgcttctctggctccaagtctggcaacacggcctccctgacaatctctgggctccaggctgaggacgaggctgattattactgc

SEQ ID NO: 10725 - DNA, 108 bp, synthetic construct; identical to SEQ ID NO: 1858
  misc_feature 1..108: note = Synthetic construct
  source 1..108: mol_type = other DNA

SEQ ID NO: 10726 - DNA, 108 bp, synthetic construct
  misc_feature 1..108: note = Synthetic construct
  source 1..108: mol_type = other DNA
caccggccctctgggatccctgaccgattctctggctccaactctgacaacgcggccaccctgaccgtcaacagggtcgaagccggggatgaggccgactattattgt

SEQ ID NO: 10727 - DNA, 108 bp, synthetic construct
  misc_feature 1..108: note = Synthetic construct
  source 1..108: mol_type = other DNA
agtcgggccacgggcatcccagacaggttccttggcagtgggtctgggacagacttcactctcaccatcagcagactggagcctgaagattttgcagtgtattactgt

SEQ ID NO: 10728 - DNA, 108 bp, synthetic construct
  misc_feature 1..108: note = Synthetic construct
  source 1..108: mol_type = other DNA
aggttgcaaagtggggtcccatcaaggttcagcggcagtggatctgggacagatttcactctcaccatcagcagcctgcagcctgacgattttgcaaattactattgt

SEQ ID NO: 10729 - DNA, 108 bp, synthetic construct
  misc_feature 1..108: note = Synthetic construct
  source 1..108: mol_type = other DNA
agtagggccactggcatctcagacaggttcagtggcagtgggtctgggacagacttcactctcaccatcagcagactggagcctgaggattttgcagtgtattactgt

SEQ ID NO: 10730 - DNA, 108 bp, synthetic construct
  misc_feature 1..108: note = Synthetic construct
  source 1..108: mol_type = other DNA
agcagggccactggcatcccagacaggttcagtggcagtgggtccgggacagacttcattctctccatcagcagactggagcctgaagattttgcagtgtattactgt

SEQ ID NO: 10731 - DNA, 108 bp, synthetic construct
  misc_feature 1..108: note = Synthetic construct
  source 1..108: mol_type = other DNA
gaccggccctcagacatccctgagcgattctcgggctccaactctgggaacacggccaccctgaccatcagcagggtcgaggccggggatgaggccgactattactgt

SEQ ID NO: 10732 - DNA, 108 bp, synthetic construct
  misc_feature 1..108: note = Synthetic construct
  source 1..108: mol_type = other DNA
aagcggccctcaggggtttctaatcgcttctctggctccaagtctgacaacacggccttcctgacaatctctgaaatacaggctgaggacgaggctgaatattattgc

SEQ ID NO: 10733 - DNA, 108 bp, synthetic construct
  misc_feature 1..108: note = Synthetic construct
  source 1..108: mol_type = other DNA
aatcggccctcaggggtccctgaccgattctctggctccaagtctgacgcctcagcctccctggtcatcactgggctccaggctgaggatgaggctgattatttctgc

SEQ ID NO: 10734 - DNA, 108 bp, synthetic construct
  misc_feature 1..108: note = Synthetic construct
  source 1..108: mol_type = other DNA
aatttagaaactgggatcccatcaaggttcagcggcagtggatctgggacagacttcactctcaccatcagcagcctgcagcctgatgattttgcaacttattactgc

SEQ ID NO: 10735 - DNA, 31 bp, synthetic construct
  misc_feature 1..31: note = Synthetic construct
  source 1..31: mol_type = other DNA
ttcggccaagggacacgactggaaagtaaac

SEQ ID NO: 10736 - DNA, 31 bp, synthetic construct
  misc_feature 1..31: note = Synthetic construct
  source 1..31: mol_type = other DNA
tttggccaggggaccaagctggacatgaaac

SEQ ID NO: 10737 - DNA, 31 bp, synthetic construct
  misc_feature 1..31: note = Synthetic construct
  source 1..31: mol_type = other DNA
ttcggaactgggaccaaggtcaccgtcctag

SEQ ID NO: 10738 - DNA, 31 bp, synthetic construct
  misc_feature 1..31: note = Synthetic construct
  source 1..31: mol_type = other DNA
ttcggccaagggaccaaggtggacatcaaac

SEQ ID NO: 10739 - DNA, 31 bp, synthetic construct
  misc_feature 1..31: note = Synthetic construct
  source 1..31: mol_type = other DNA
ttcggccctgggaccagagtggatatcaaac

SEQ ID NO: 10740 - DNA, 31 bp, synthetic construct
  misc_feature 1..31: note = Synthetic construct
  source 1..31: mol_type = other DNA
tttggccaggggaccaacctggaaatcaaac

SEQ ID NO: 10741 - DNA, 31 bp, synthetic construct
  misc_feature 1..31: note = Synthetic construct
  source 1..31: mol_type = other DNA
ttcggcggagggaccacgctgaccgtcctag

SEQ ID NO: 10742 - DNA, 31 bp, synthetic construct
  misc_feature 1..31: note = Synthetic construct
  source 1..31: mol_type = other DNA
ttcggcggagggaccgacctgaccgtcctgg

SEQ ID NO: 10743 - DNA, 31 bp, synthetic construct
  misc_feature 1..31: note = Synthetic construct
  source 1..31: mol_type = other DNA
ttcggccaagggaccaaggtggaaatcaaac

SEQ ID NO: 10744 - DNA, 31 bp, synthetic construct
  misc_feature 1..31: note = Synthetic construct
  source 1..31: mol_type = other DNA
tttggcccggggaccaagctggagatcaaac

SEQ ID NO: 10745 - DNA, 31 bp, synthetic construct
  misc_feature 1..31: note = Synthetic construct
  source 1..31: mol_type = other DNA
ttcggcggagggaccaagctgaccgtcctcg

SEQ ID NO: 10746 - DNA, 31 bp, synthetic construct
  misc_feature 1..31: note = Synthetic construct
  source 1..31: mol_type = other DNA
ttcggccctgggaccaaagtgggtatcaaac

SEQ ID NO: 10747 - DNA, 31 bp, synthetic construct
  misc_feature 1..31: note = Synthetic construct
  source 1..31: mol_type = other DNA
ttcggcggagggacccacctggccgtcctgg

SEQ ID NO: 10748 - DNA, 31 bp, synthetic construct
  misc_feature 1..31: note = Synthetic construct
  source 1..31: mol_type = other DNA
ttcggcggagggaccaagctgaccgtcctag

SEQ ID NO: 10749 - DNA, 31 bp, synthetic construct
  misc_feature 1..31: note = Synthetic construct
  source 1..31: mol_type = other DNA
ttcggccaagggacacgactggagattaaac

SEQ ID NO: 10750 - DNA, 31 bp, synthetic construct
  misc_feature 1..31: note = Synthetic construct
  source 1..31: mol_type = other DNA
ttcggccctgggaccaaagtgggtgtcaaac

SEQ ID NO: 10751 - DNA, 31 bp, synthetic construct
  misc_feature 1..31: note = Synthetic construct
  source 1..31: mol_type = other DNA
ttcggcggagggaccaggctgaccgtcccag

SEQ ID NO: 10752 - DNA, 31 bp, synthetic construct
  misc_feature 1..31: note = Synthetic construct
  source 1..31: mol_type = other DNA
ttcggccaagggaccaaggtggaagtcaaac

SEQ ID NO: 10753 - DNA, 31 bp, synthetic construct
  misc_feature 1..31: note = Synthetic construct
  source 1..31: mol_type = other DNA
ttcggctctgggaccaaggtcaccgtcctag

SEQ ID NO: 10754 - DNA, 31 bp, synthetic construct
  misc_feature 1..31: note = Synthetic construct
  source 1..31: mol_type = other DNA
ttcggcggtgggaccagggtgaccgtcctca

SEQ ID NO: 10755 - DNA, 31 bp, synthetic construct
  misc_feature 1..31: note = Synthetic construct
  source 1..31: mol_type = other DNA
tttggccaggggaccaaggtggagattaacc

SEQ ID NO: 10756 - DNA, 31 bp, synthetic construct
  misc_feature 1..31: note = Synthetic construct
  source 1..31: mol_type = other DNA
tttggccaggggaccaagctggagatcaaac

SEQ ID NO: 10757 - DNA, 31 bp, synthetic construct
  misc_feature 1..31: note = Synthetic construct
  source 1..31: mol_type = other DNA
ttcggccaagggtccaaggtggaaatcaaac

SEQ ID NO: 10758 - DNA, 31 bp, synthetic construct; identical to SEQ ID NO: 1859
  misc_feature 1..31: note = Synthetic construct
  source 1..31: mol_type = other DNA

SEQ ID NO: 10759 - DNA, 31 bp, synthetic construct
  misc_feature 1..31: note = Synthetic construct
  source 1..31: mol_type = other DNA
ttcggcccagggacccacctggagatcaacc

SEQ ID NO: 10760 - DNA, 31 bp, synthetic construct
  misc_feature 1..31: note = Synthetic construct
  source 1..31: mol_type = other DNA
ttcggcggagggaccaagttgaccgtcctag

SEQ ID NO: 10761 - DNA, 31 bp, synthetic construct
  misc_feature 1..31: note = Synthetic construct
  source 1..31: mol_type = other DNA
ttcggcggggggacaaagttgaccgtcctag

SEQ ID NO: 10762 - DNA, 31 bp, synthetic construct
  misc_feature 1..31: note = Synthetic construct
  source 1..31: mol_type = other DNA
ttcggaactgggaccgaggtcaccgtcctag

SEQ ID NO: 10763 - DNA, 31 bp, synthetic construct
  misc_feature 1..31: note = Synthetic construct
  source 1..31: mol_type = other DNA
ttcggccctgggaccaaagtggatatcaaac

SEQ ID NO: 10764 - DNA, 31 bp, synthetic construct
  misc_feature 1..31: note = Synthetic construct
  source 1..31: mol_type = other DNA
ttcggacttgggaccacggtcaccgtcctac

SEQ ID NO: 10765 - DNA, 31 bp, synthetic construct
  misc_feature 1..31: note = Synthetic construct
  source 1..31: mol_type = other DNA
ttcggcggagggaccaaggtgaccgtcctag

SEQ ID NO: 10766 - DNA, 31 bp, synthetic construct
  misc_feature 1..31: note = Synthetic construct
  source 1..31: mol_type = other DNA
ttcggaaatgggaccaaggtgatagtcctgg

SEQ ID NO: 10767 - DNA, 31 bp, synthetic construct
  misc_feature 1..31: note = Synthetic construct
  source 1..31: mol_type = other DNA
tttggcccggggaccaagctggagatcagag

SEQ ID NO: 10768 - DNA, 12 bp, synthetic construct
  misc_feature 1..12: note = Synthetic construct
  source 1..12: mol_type = other DNA
ttcggccgaggg

SEQ ID NO: 10769 - DNA, 31 bp, synthetic construct; identical to SEQ ID NO: 1862
  misc_feature 1..31: note = Synthetic construct
  source 1..31: mol_type = other DNA

SEQ ID NO: 10770 - DNA, 31 bp, synthetic construct
  misc_feature 1..31: note = Synthetic construct
  source 1..31: mol_type = other DNA
ttcggaaatgggaccagggtcgccgtcctcg

SEQ ID NO: 10771 - DNA, 31 bp, synthetic construct; identical to SEQ ID NO: 1863
  misc_feature 1..31: note = Synthetic construct
  source 1..31: mol_type = other DNA

SEQ ID NO: 10772 - DNA, 31 bp, synthetic construct
  misc_feature 1..31: note = Synthetic construct
  source 1..31: mol_type = other DNA
ttcggaattgggaccaaggtcaccgtcctag

SEQ ID NO: 10773 - DNA, 31 bp, synthetic construct
  misc_feature 1..31: note = Synthetic construct
  source 1..31: mol_type = other DNA
tatggccaggggaccaagctggagatcaaac

SEQ ID NO: 10774 - DNA, 31 bp, synthetic construct
  misc_feature 1..31: note = Synthetic construct
  source 1..31: mol_type = other DNA
tttggccaggggaccaaggtggagatcaaac

SEQ ID NO: 10775 - DNA, 31 bp, synthetic construct
  misc_feature 1..31: note = Synthetic construct
  source 1..31: mol_type = other DNA
ttcggcggagggaccaaggtgaccgtcctgg

SEQ ID NO: 10776 - DNA, 31 bp, synthetic construct
  misc_feature 1..31: note = Synthetic construct
  source 1..31: mol_type = other DNA
ttcggaactgggaccaaggtcatcgtcctag

SEQ ID NO: 10777 - DNA, 31 bp, synthetic construct
  misc_feature 1..31: note = Synthetic construct
  source 1..31: mol_type = other DNA
ttcggccaagggacacggctggacattaaac

SEQ ID NO: 10778 - DNA, 31 bp, synthetic construct
  misc_feature 1..31: note = Synthetic construct
  source 1..31: mol_type = other DNA
ttcggccaggggaccaaggtggaaatcaaac

SEQ ID NO: 10779 - DNA, 31 bp, synthetic construct
  misc_feature 1..31: note = Synthetic construct
  source 1..31: mol_type = other DNA
ttcggcggaggggccaagctgaccgtcctag

SEQ ID NO: 10780 - DNA, 31 bp, synthetic construct
  misc_feature 1..31: note = Synthetic construct
  source 1..31: mol_type = other DNA
ttcggccctgggaccaaagtggagatcaaac

SEQ ID NO: 10781 - DNA, 31 bp, synthetic construct
  misc_feature 1..31: note = Synthetic construct
  source 1..31: mol_type = other DNA
ttcggccctgggaccaaagtggaaatcaaac

SEQ ID NO: 10782 - DNA, 31 bp, synthetic construct
  misc_feature 1..31: note = Synthetic construct
  source 1..31: mol_type = other DNA
ttcggcccagggacccaggtagaagtcagac

SEQ ID NO: 10783 - DNA, 31 bp, synthetic construct
  misc_feature 1..31: note = Synthetic construct
  source 1..31: mol_type = other DNA
ttcgggcctgggaccaaagtggatatgaaac

SEQ ID NO: 10784 - DNA, 31 bp, synthetic construct
  misc_feature 1..31: note = Synthetic construct
  source 1..31: mol_type = other DNA
ttcggcggagggaccagggtggagatcaaac

SEQ ID NO: 10785 - DNA, 31 bp, synthetic construct
  misc_feature 1..31: note = Synthetic construct
  source 1..31: mol_type = other DNA
tttggccaagggaccagggtggaaatcaaac

SEQ ID NO: 10786 - DNA, 31 bp, synthetic construct
  misc_feature 1..31: note = Synthetic construct
  source 1..31: mol_type = other DNA
tttggccaggggaccaagctggagatcaacc

SEQ ID NO: 10787 - DNA, 31 bp, synthetic construct
  misc_feature 1..31: note = Synthetic construct
  source 1..31: mol_type = other DNA
ttcggcggcgggaccaaggtggagatcagac

SEQ ID NO: 10788 - DNA, 31 bp, synthetic construct
  misc_feature 1..31: note = Synthetic construct
  source 1..31: mol_type = other DNA
ttcggcggcgggaccaaggtgcagatcaaac

SEQ ID NO: 10789 - DNA, 31 bp, synthetic construct
  misc_feature 1..31: note = Synthetic construct
  source 1..31: mol_type = other DNA
tttggccccgggaccaaggtcgatagcaaac

SEQ ID NO: 10790 - DNA, 31 bp, synthetic construct
  misc_feature 1..31: note = Synthetic construct
  source 1..31: mol_type = other DNA
ttcggccctgggaccacagtggaaatcaaac

SEQ ID NO: 10791 - DNA, 31 bp, synthetic construct
  misc_feature 1..31: note = Synthetic construct
  source 1..31: mol_type = other DNA
ttcggccctgggaccaaactggatatcaaac

SEQ ID NO: 10792 - DNA, 31 bp, synthetic construct
  misc_feature 1..31: note = Synthetic construct
  source 1..31: mol_type = other DNA
tttgcccaggggaccaaactggagatcaaac

SEQ ID NO: 10793 - DNA, 31 bp, synthetic construct
  misc_feature 1..31: note = Synthetic construct
  source 1..31: mol_type = other DNA
ttcggcagagggacgaagctgatcgtcctag

SEQ ID NO: 10794 - DNA, 31 bp, synthetic construct
  misc_feature 1..31: note = Synthetic construct
  source 1..31: mol_type = other DNA
ttcggaagtgggaccaaggtcaccgtcctag

SEQ ID NO: 10795 - DNA, 31 bp, synthetic construct
  misc_feature 1..31: note = Synthetic construct
  source 1..31: mol_type = other DNA
ttcggcggagggacgaagctgaccgtcctag

SEQ ID NO: 10796 - DNA, 31 bp, synthetic construct
  misc_feature 1..31: note = Synthetic construct
  source 1..31: mol_type = other DNA
ttcgtcggagggaccaagctgaccgtcctag

SEQ ID NO: 10797 - DNA, 31 bp, synthetic construct
  misc_feature 1..31: note = Synthetic construct
  source 1..31: mol_type = other DNA
ttcggcggagggaccaggctgaccgtcctag

SEQ ID NO: 10798 - DNA, 31 bp, synthetic construct
  misc_feature 1..31: note = Synthetic construct
  source 1..31: mol_type = other DNA
ttcggcggagggaccaacctgaccgtcctaa

SEQ ID NO: 10799 - DNA, 31 bp, synthetic construct
  misc_feature 1..31: note = Synthetic construct
  source 1..31: mol_type = other DNA
ttcggcggagggaccaacctgaccgtcctag

SEQ ID NO: 10800 - DNA, 31 bp, synthetic construct
  misc_feature 1..31: note = Synthetic construct
  source 1..31: mol_type = other DNA
ttcggcggagggcccaagctgaccgtcctag

SEQ ID NO: 10801 - DNA, 31 bp, synthetic construct
  misc_feature 1..31: note = Synthetic construct
  source 1..31: mol_type = other DNA
ttcggcggagggaccaagcggaccgtcctag

SEQ ID NO: 10802 - DNA, 31 bp, synthetic construct
  misc_feature 1..31: note = Synthetic construct
  source 1..31: mol_type = other DNA
ttcggcggagggaccaaggtggagatcagac

SEQ ID NO: 10803 - DNA, 31 bp, synthetic construct
  misc_feature 1..31: note = Synthetic construct
  source 1..31: mol_type = other DNA
ttcggcctagggaccaaggtggaaatcaaac

SEQ ID NO: 10804 - DNA, 31 bp, synthetic construct
  misc_feature 1..31: note = Synthetic construct
  source 1..31: mol_type = other DNA
ttcggcggcgggaccaggctgaccgtcctga

SEQ ID NO: 10805 - DNA, 31 bp, synthetic construct
  misc_feature 1..31: note = Synthetic construct
  source 1..31: mol_type = other DNA
ttcggaagtgggaccaaggtcaccgttgtag

SEQ ID NO: 10806 - DNA, 31 bp, synthetic construct
  misc_feature 1..31: note = Synthetic construct
  source 1..31: mol_type = other DNA
ttcggcggggggaccaagctgaccgtcctag

SEQ ID NO: 10807 - DNA, 31 bp, synthetic construct
  misc_feature 1..31: note = Synthetic construct
  source 1..31: mol_type = other DNA
ttcggaggaggcacccacctgaccgtcctcg

SEQ ID NO: 10808 - DNA, 31 bp, synthetic construct
  misc_feature 1..31: note = Synthetic construct
  source 1..31: mol_type = other DNA
ttcggcggggggaccaagctgaccgtcctgg

SEQ ID NO: 10809 - DNA, 31 bp, synthetic construct
  misc_feature 1..31: note = Synthetic construct
  source 1..31: mol_type = other DNA
ttcggcggagggaccaaggtggagatccaac

SEQ ID NO: 10810 - DNA, 31 bp, synthetic construct
  misc_feature 1..31: note = Synthetic construct
  source 1..31: mol_type = other DNA
ttcggcggcgggaccaagttgaccgtcctag

SEQ ID NO: 10811 - DNA, 31 bp, synthetic construct
  misc_feature 1..31: note = Synthetic construct
  source 1..31: mol_type = other DNA
tttggccaggggaccaagctggacatcaaac

SEQ ID NO: 10812 - DNA, 31 bp, synthetic construct
  misc_feature 1..31: note = Synthetic construct
  source 1..31: mol_type = other DNA
ttcggcggagggaccaagttgaccgtcctcg

SEQ ID NO: 10813 - DNA, 31 bp, synthetic construct
  misc_feature 1..31: note = Synthetic construct
  source 1..31: mol_type = other DNA
ttcggcggagggaccaagctgaccgtcctac

SEQ ID NO: 10814 - DNA, 31 bp, synthetic construct
  misc_feature 1..31: note = Synthetic construct
  source 1..31: mol_type = other DNA
ttcggcggagggaccaaactgaccgtcctag

SEQ ID NO: 10815 - DNA, 31 bp, synthetic construct
  misc_feature 1..31: note = Synthetic construct
  source 1..31: mol_type = other DNA
ttcggccaggggaccagggtggatatcaagc

SEQ ID NO: 10816 - DNA, 31 bp, synthetic construct
  misc_feature 1..31: note = Synthetic construct
  source 1..31: mol_type = other DNA
tttggccaggggaccaagctggagatcagac

SEQ ID NO: 10817 - DNA, 31 bp, synthetic construct
  misc_feature 1..31: note = Synthetic construct
  source 1..31: mol_type = other DNA
tttggccaggggaccaaggtggagatcagcc

SEQ ID NO: 10818 - DNA, 31 bp, synthetic construct
  misc_feature 1..31: note = Synthetic construct
  source 1..31: mol_type = other DNA
tttggccaggggaccaagttggagatcaaac

SEQ ID NO: 10819 - DNA, 31 bp, synthetic construct
  misc_feature 1..31: note = Synthetic construct
  source 1..31: mol_type = other DNA
ttcggcggagggaccaaggtcgagatcaaac

SEQ ID NO: 10820 - DNA, 31 bp, synthetic construct
  misc_feature 1..31: note = Synthetic construct
  source 1..31: mol_type = other DNA
ttcggccaagggaccaaggtggaaatcaacc

SEQ ID NO: 10821 - DNA, 31 bp, synthetic construct
  misc_feature 1..31: note = Synthetic construct
  source 1..31: mol_type = other DNA
tttggccaggggacgaaactggagatcaagc

SEQ ID NO: 10822 - DNA, 31 bp, synthetic construct
  misc_feature 1..31: note = Synthetic construct
  source 1..31: mol_type = other DNA
tttggccaggggaccatactggagatcaaac

SEQ ID NO: 10823 - DNA, 31 bp, synthetic construct
  misc_feature 1..31: note = Synthetic construct
  source 1..31: mol_type = other DNA
atcggcggcgggaccaagctgaccgtcctag

SEQ ID NO: 10824 - DNA, 31 bp, synthetic construct
  misc_feature 1..31: note = Synthetic construct
  source 1..31: mol_type = other DNA
ttcggcggggggaccaaggtggacgtcaagc

SEQ ID NO: 10825 - DNA, 31 bp, synthetic construct
  misc_feature 1..31: note = Synthetic construct
  source 1..31: mol_type = other DNA
tttggccaggggaccaacctggagatcaaac

SEQ ID NO: 10826 - DNA, 14 bp, synthetic construct
  misc_feature 1..14: note = Synthetic construct
  source 1..14: mol_type = other DNA
ttcggccaagggac

SEQ ID NO: 10827 - DNA, 31 bp, synthetic construct
  misc_feature 1..31: note = Synthetic construct
  source 1..31: mol_type = other DNA
ttcggccaagggacccaggtggaaatcaaac

SEQ ID NO: 10828 - DNA, 31 bp, synthetic construct
  misc_feature 1..31: note = Synthetic construct
  source 1..31: mol_type = other DNA
ttcggccaggggaccaaggtggaggtcaaac

SEQ ID NO: 10829 - DNA, 31 bp, synthetic construct
  misc_feature 1..31: note = Synthetic construct
  source 1..31: mol_type = other DNA
ttcggcggagggaccaaggtggaggtcaaac

SEQ ID NO: 10830 - DNA, 31 bp, synthetic construct
  misc_feature 1..31: note = Synthetic construct
  source 1..31: mol_type = other DNA
ttcggcggagggaccaaggtggagatcaacc

SEQ ID NO: 10831 - DNA, 31 bp, synthetic construct
  misc_feature 1..31: note = Synthetic construct
  source 1..31: mol_type = other DNA
ttcggcggcgggaccaagctgaccgtcctag

SEQ ID NO: 10832 - DNA, 31 bp, synthetic construct
  misc_feature 1..31: note = Synthetic construct
  source 1..31: mol_type = other DNA
tttggccaggggaccaagctggagatcaagc

SEQ ID NO: 10833 - DNA, 31 bp, synthetic construct
  misc_feature 1..31: note = Synthetic construct
  source 1..31: mol_type = other DNA
ttcggcggacagaccaagctgaccgtcctag

SEQ ID NO: 10834 - DNA, 31 bp, synthetic construct
  misc_feature 1..31: note = Synthetic construct
  source 1..31: mol_type = other DNA
tttggccaggggaccaaactggagatcaaac

SEQ ID NO: 10835 - DNA, 31 bp, synthetic construct
  misc_feature 1..31: note = Synthetic construct
  source 1..31: mol_type = other DNA
ttcggaagtgggaccacagtcaccgtcctaa

SEQ ID NO: 10836 - DNA, 31 bp, synthetic construct
  misc_feature 1..31: note = Synthetic construct
  source 1..31: mol_type = other DNA
tttggccaggggaccaagctggagatcaatc

SEQ ID NO: 10837 - DNA, 31 bp, synthetic construct
  misc_feature 1..31: note = Synthetic construct
  source 1..31: mol_type = other DNA
ttcggccaagggacacgattggagattaacc

SEQ ID NO: 10838 - DNA, 31 bp, synthetic construct
  misc_feature 1..31: note = Synthetic construct
  source 1..31: mol_type = other DNA
ttcggcggagggaccaagctgaccgtcgtag

SEQ ID NO: 10839 - DNA, 31 bp, synthetic construct
  misc_feature 1..31: note = Synthetic construct
  source 1..31: mol_type = other DNA
ttcggaactgggaccaaggtcaccgtccttg

SEQ ID NO: 10840 - DNA, 31 bp, synthetic construct
  misc_feature 1..31: note = Synthetic construct
  source 1..31: mol_type = other DNA
ttcggcggagggaccaaggtggagatcaccc

SEQ ID NO: 10841 - DNA, 31 bp, synthetic construct
  misc_feature 1..31: note = Synthetic construct
  source 1..31: mol_type = other DNA
tttggccgggggtccaagctggagatcgaac

SEQ ID NO: 10842 - DNA, 31 bp, synthetic construct
  misc_feature 1..31: note = Synthetic construct
  source 1..31: mol_type = other DNA
ttcggccaagggaccaaggtggaaagcagac

SEQ ID NO: 10843 - DNA, 31 bp, synthetic construct
  misc_feature 1..31: note = Synthetic construct
  source 1..31: mol_type = other DNA
ttcggccaagggaccaaggtggagatcaaac

SEQ ID NO: 10844 - DNA, 31 bp, synthetic construct
  misc_feature 1..31: note = Synthetic construct
  source 1..31: mol_type = other DNA
ttcggaactgggaccaaggtcaccgttctgg

SEQ ID NO: 10845 - DNA, 31 bp, synthetic construct
  misc_feature 1..31: note = Synthetic construct
  source 1..31: mol_type = other DNA
ttcggccctgggaccaaagtggatgtcaaac

SEQ ID NO: 10846 - DNA, 31 bp, synthetic construct
  misc_feature 1..31: note = Synthetic construct
  source 1..31: mol_type = other DNA
ttcggcggcgggaccaagctcattgtcctaa

SEQ ID NO: 10847 - DNA, 31 bp, synthetic construct
  misc_feature 1..31: note = Synthetic construct
  source 1..31: mol_type = other DNA
ttcggaagtgggaccgaggtcaccgtcctag

SEQ ID NO: 10848 - DNA, 31 bp, synthetic construct
  misc_feature 1..31: note = Synthetic construct
  source 1..31: mol_type = other DNA
ttcggccaagggaccaaagtagaaatcaatc

SEQ ID NO: 10849 - DNA, 31 bp, synthetic construct
  misc_feature 1..31: note = Synthetic construct
  source 1..31: mol_type = other DNA
ttcggccaagggaccaaggtggaaatcagac

SEQ ID NO: 10850 - DNA, 31 bp, synthetic construct
  misc_feature 1..31: note = Synthetic construct
  source 1..31: mol_type = other DNA
ttcggcggagggaccagactgaccgtcctag

SEQ ID NO: 10851 - DNA, 31 bp, synthetic construct
  misc_feature 1..31: note = Synthetic construct
  source 1..31: mol_type = other DNA
ttcggccaagggaccagggtggaagtcaaac

SEQ ID NO: 10852 - DNA, 31 bp, synthetic construct
  misc_feature 1..31: note = Synthetic construct
  source 1..31: mol_type = other DNA
ttcggagctgggaccaaggtcaccgtcctag

SEQ ID NO: 10853 - DNA, 31 bp, synthetic construct
  misc_feature 1..31: note = Synthetic construct
  source 1..31: mol_type = other DNA
tttggccaggggaccaacgtggagatcaaac

SEQ ID NO: 10854 - DNA, 31 bp, synthetic construct
  misc_feature 1..31: note = Synthetic construct
  source 1..31: mol_type = other DNA
ttcggccaagggaccagggtggaaatcaaaa

SEQ ID NO: 10855 - DNA, 31 bp, synthetic construct
  misc_feature 1..31: note = Synthetic construct
  source 1..31: mol_type = other DNA
ttcggccaggggaccacggtggaaatcaaag

SEQ ID NO: 10856 - DNA, 31 bp, synthetic construct
  misc_feature 1..31: note = Synthetic construct
  source 1..31: mol_type = other DNA
ttcggccaagggaccagggtggaaatcagac

SEQ ID NO: 10857 - DNA, 31 bp, synthetic construct
  misc_feature 1..31: note = Synthetic construct
  source 1..31: mol_type = other DNA
ttcggaaccgggaccaaggtcaccgtcctag

SEQ ID NO: 10858 - DNA, 31 bp, synthetic construct
  misc_feature 1..31: note = Synthetic construct
  source 1..31: mol_type = other DNA
ttcggccaagggacacgtctggagattaaac

SEQ ID NO: 10859 - DNA, 31 bp, synthetic construct
  misc_feature 1..31: note = Synthetic construct
  source 1..31: mol_type = other DNA
ttcggaagtccgaccacggtcatcgtccttg

SEQ ID NO: 10860 - DNA, 31 bp, synthetic construct
  misc_feature 1..31: note = Synthetic construct
  source 1..31: mol_type = other DNA
ttcggcccggggaccaagctgcacgtcaaac

SEQ ID NO: 10861 - DNA, 31 bp, synthetic construct
  misc_feature 1..31: note = Synthetic construct
  source 1..31: mol_type = other DNA
ttcggcggagggaccaaggtggagctcaaac

SEQ ID NO: 10862 - DNA, 31 bp, synthetic construct
  misc_feature 1..31: note = Synthetic construct
  source 1..31: mol_type = other DNA
ttcggccaagggaccaaggtggaaatcaagc

SEQ ID NO: 10863 - DNA, 31 bp, synthetic construct
  misc_feature 1..31: note = Synthetic construct
  source 1..31: mol_type = other DNA
ttcggcccggggaccaaggtggaaatcaagc

SEQ ID NO: 10864 - DNA, 31 bp, synthetic construct
  misc_feature 1..31: note = Synthetic construct
  source 1..31: mol_type = other DNA
ttcggccctgggaccaaagtggatctcaaac

SEQ ID NO: 10865 - DNA, 31 bp, synthetic construct
  misc_feature 1..31: note = Synthetic construct
  source 1..31: mol_type = other DNA
tttggccaggggaccaaggtggaatccaaac

SEQ ID NO: 10866 - DNA, 31 bp, synthetic construct
  misc_feature 1..31: note = Synthetic construct
  source 1..31: mol_type = other DNA
ttcggcggagggaccaggctgaccgtcgtag

SEQ ID NO: 10867 - DNA, 31 bp, synthetic construct
  misc_feature 1..31: note = Synthetic construct
  source 1..31: mol_type = other DNA
ttcggcggagggaccaagctgaccgtccttg

SEQ ID NO: 10868 - DNA, 31 bp, synthetic construct; identical to SEQ ID NO: 1861
  misc_feature 1..31: note = Synthetic construct
  source 1..31: mol_type = other DNA

SEQ ID NO: 10869 - DNA, 31 bp, synthetic construct
  misc_feature 1..31: note = Synthetic construct
  source 1..31: mol_type = other DNA
ttcggccaagggaccagggtggaaatcaaac

SEQ ID NO: 10870 - DNA, 31 bp, synthetic construct
  misc_feature 1..31: note = Synthetic construct
  source 1..31: mol_type = other DNA
ttcggcggagggaccaggatgaccgtcctag

SEQ ID NO: 10871 - DNA, 31 bp, synthetic construct
  misc_feature 1..31: note = Synthetic construct
  source 1..31: mol_type = other DNA
ttcggcggagggaccaaagtgaccgtcctaa

SEQ ID NO: 10872 - DNA, 31 bp, synthetic construct
  misc_feature 1..31: note = Synthetic construct
  source 1..31: mol_type = other DNA
ttcggccaagggaccaaggttgaagtcaaac

SEQ ID NO: 10873 - DNA, 31 bp, synthetic construct
  misc_feature 1..31: note = Synthetic construct
  source 1..31: mol_type = other DNA
tttggtcaggggactgaactggatctcaaac

SEQ ID NO: 10874 - DNA, 31 bp, synthetic construct
  misc_feature 1..31: note = Synthetic construct
  source 1..31: mol_type = other DNA
ttcggacctgggaccaaggtcaccgtcctac

SEQ ID NO: 10875 - DNA, 31 bp, synthetic construct
  misc_feature 1..31: note = Synthetic construct
  source 1..31: mol_type = other DNA
ttcggccaagggacacgactggagattaagc

SEQ ID NO: 10876 - DNA, 31 bp, synthetic construct
  misc_feature 1..31: note = Synthetic construct
  source 1..31: mol_type = other DNA
ttcggcggaggtaccaaggtgaccgtcctaa

SEQ ID NO: 10877 - DNA, 31 bp, synthetic construct
  misc_feature 1..31: note = Synthetic construct
  source 1..31: mol_type = other DNA
ttcggcagtggcaccaaggtgaccgtcctcg

SEQ ID NO: 10878 - DNA, 31 bp, synthetic construct
  misc_feature 1..31: note = Synthetic construct
  source 1..31: mol_type = other DNA
ttcggcggcgggaccaaggtggagatcaagc

SEQ ID NO: 10879 - DNA, 31 bp, synthetic construct
  misc_feature 1..31: note = Synthetic construct
  source 1..31: mol_type = other DNA
ttcggcggtgggaccaagctgaccgtcctac

SEQ ID NO: 10880 - DNA, 31 bp, synthetic construct
  misc_feature 1..31: note = Synthetic construct
  source 1..31: mol_type = other DNA
ttcggcgaagggaccaagctgaccgtcctag

SEQ ID NO: 10881 - DNA, 31 bp, synthetic construct
  misc_feature 1..31: note = Synthetic construct
  source 1..31: mol_type = other DNA
ttcggaactcagaccaaggtcaccgtcctga

SEQ ID NO: 10882 - DNA, 31 bp, synthetic construct
  misc_feature 1..31: note = Synthetic construct
  source 1..31: mol_type = other DNA
ttcgcaactgggaccaaggtcaccgtcctag

SEQ ID NO: 10883 - DNA, 31 bp, synthetic construct
  misc_feature 1..31: note = Synthetic construct
  source 1..31: mol_type = other DNA
ttcggccccgggaccaaggtggaaatcaaac

SEQ ID NO: 10884 - DNA, 31 bp, synthetic construct
  misc_feature 1..31: note = Synthetic construct
  source 1..31: mol_type = other DNA
ttcggccaagggaccaaggtggaaatcacac

SEQ ID NO: 10885 - DNA, 31 bp, synthetic construct
  misc_feature 1..31: note = Synthetic construct
  source 1..31: mol_type = other DNA
ttcggtcaggggaccaaggtggaagtcaaac

SEQ ID NO: 10886 - DNA, 31 bp, synthetic construct
  misc_feature 1..31: note = Synthetic construct
  source 1..31: mol_type = other DNA
ttcggccaagggaccaaggtggatctcaatc

SEQ ID NO: 10887 - DNA, 31 bp, synthetic construct
  misc_feature 1..31: note = Synthetic construct
  source 1..31: mol_type = other DNA
tttggcggagggaccaagctgaccgtcctag

SEQ ID NO: 10888 - DNA, 31 bp, synthetic construct
  misc_feature 1..31: note = Synthetic construct
  source 1..31: mol_type = other DNA
ttcggccctgggaccacagtcaatatcaaac

SEQ ID NO: 10889 - DNA, 31 bp, synthetic construct
  misc_feature 1..31: note = Synthetic construct
  source 1..31: mol_type = other DNA
tttggccaggggaccaggctggagatcaaac

SEQ ID NO: 10890 - DNA, 31 bp, synthetic construct
  misc_feature 1..31: note = Synthetic construct
  source 1..31: mol_type = other DNA
ttcggccctgggaccgtagtggatatcaaac

SEQ ID NO: 10891 - DNA, 31 bp, synthetic construct
  misc_feature 1..31: note = Synthetic construct
  source 1..31: mol_type = other DNA
tttggcggagggaccaagcggaccgtccgag

SEQ ID NO: 10892 - DNA, 31 bp, synthetic construct
  misc_feature 1..31: note = Synthetic construct
  source 1..31: mol_type = other DNA
ttcggccctgggaccacagttgatatcaaac

SEQ ID NO: 10893 - DNA, 31 bp, synthetic construct
  misc_feature 1..31: note = Synthetic construct
  source 1..31: mol_type = other DNA
ttcggcggcgggaccaaggtggagatcaaac

SEQ ID NO: 10894 - DNA, 31 bp, synthetic construct
  misc_feature 1..31: note = Synthetic construct
  source 1..31: mol_type = other DNA
ttcggcggagggaccaaggtggacatcacac

SEQ ID NO: 10895 - DNA, 31 bp, synthetic construct
  misc_feature 1..31: note = Synthetic construct
  source 1..31: mol_type = other DNA
ttcggcggagggactaagctgaccgtcctaa

SEQ ID NO: 10896 - DNA, 31 bp, synthetic construct
  misc_feature 1..31: note = Synthetic construct
  source 1..31: mol_type = other DNA
ttcggccctgggaccaaagtggatgccaaac

SEQ ID NO: 10897 - DNA, 31 bp, synthetic construct
  misc_feature 1..31: note = Synthetic construct
  source 1..31: mol_type = other DNA
ttcggcggagggaccaagctgaccgtcctaa

SEQ ID NO: 10898 - DNA, 31 bp, synthetic construct
  misc_feature 1..31: note = Synthetic construct
  source 1..31: mol_type = other DNA
ttcggccctgggaccacagtggatatcaaac

SEQ ID NO: 10899 - DNA, 31 bp, synthetic construct
  misc_feature 1..31: note = Synthetic construct
  source 1..31: mol_type = other DNA
ttcggaactgggaccaaggtcaccgtcctaa

SEQ ID NO: 10900 - DNA, 31 bp, synthetic construct
  misc_feature 1..31: note = Synthetic construct
  source 1..31: mol_type = other DNA
ttcggcagagggaccaaggtgaccgtcctag

SEQ ID NO: 10901 - DNA, 31 bp, synthetic construct
  misc_feature 1..31: note = Synthetic construct
  source 1..31: mol_type = other DNA
ttcggcggagggaccgagctgaccgtcctag

SEQ ID NO: 10902 - DNA, 31 bp, synthetic construct
  misc_feature 1..31: note = Synthetic construct
  source 1..31: mol_type = other DNA
ttcggccctgggaccaaactggatatcaagc

SEQ ID NO: 10903 - DNA, 31 bp, synthetic construct
  misc_feature 1..31: note = Synthetic construct
  source 1..31: mol_type = other DNA
ttcggccaggggacacgactggagattaaaa

SEQ ID NO: 10904 - DNA, 31 bp, synthetic construct
  misc_feature 1..31: note = Synthetic construct
  source 1..31: mol_type = other DNA
ttcggcggagggacaaagctgaccgtcctag

SEQ ID NO: 10905 - DNA, 31 bp, synthetic construct
  misc_feature 1..31: note = Synthetic construct
  source 1..31: mol_type = other DNA
ttcggccaggggacgaaggtggaaatcaaac

SEQ ID NO: 10906 - DNA, 31 bp, synthetic construct
  misc_feature 1..31: note = Synthetic construct
  source 1..31: mol_type = other DNA
ttcggcccagggaccaaggtggaaatcagac

SEQ ID NO: 10907 - DNA, 31 bp, synthetic construct
  misc_feature 1..31: note = Synthetic construct
  source 1..31: mol_type = other DNA
ttcggccctgggaccatagtggatatcaaac

SEQ ID NO: 10908 - DNA, 31 bp, synthetic construct
  misc_feature 1..31: note = Synthetic construct
  source 1..31: mol_type = other DNA
ttcggccctgggacctcagtggatatcaaac

SEQ ID NO: 10909 - DNA, 31 bp, synthetic construct
  misc_feature 1..31: note = Synthetic construct
  source 1..31: mol_type = other DNA
ttcggcggagggaccaagctgaccgtcttag

SEQ ID NO: 10910 - DNA, 31 bp, synthetic construct
  misc_feature 1..31: note = Synthetic construct
  source 1..31: mol_type = other DNA
ttcggccgagggaccaaggtggaaatcaagc

SEQ ID NO: 10911 - DNA, 31 bp, synthetic construct
  misc_feature 1..31: note = Synthetic construct
  source 1..31: mol_type = other DNA
ttcggcggagggaccaacgttgagatgaaac

SEQ ID NO: 10912 - DNA, 31 bp, synthetic construct
  misc_feature 1..31: note = Synthetic construct
  source 1..31: mol_type = other DNA
ttcggcggcgggaccaagctgaccgtcctaa

SEQ ID NO: 10913 - DNA, 31 bp, synthetic construct
  misc_feature 1..31: note = Synthetic construct
  source 1..31: mol_type = other DNA
ttcggccaagggacacgactggatattaagc

SEQ ID NO: 10914 - DNA, 31 bp, synthetic construct
  misc_feature 1..31: note = Synthetic construct
  source 1..31: mol_type = other DNA
ttcggccaagggaccaaggtggaagtcaagc

SEQ ID NO: 10915 - DNA, 31 bp, synthetic construct
  misc_feature 1..31: note = Synthetic construct
  source 1..31: mol_type = other DNA
tttggccaggggaccaagttggaggtcaaac

SEQ ID NO: 10916 - DNA, 31 bp, synthetic construct
  misc_feature 1..31: note = Synthetic construct
  source 1..31: mol_type = other DNA
ttcggaagtgggacccaggtcatcgtcctag

SEQ ID NO: 10917 - DNA, 31 bp, synthetic construct
  misc_feature 1..31: note = Synthetic construct
  source 1..31: mol_type = other DNA
ttcggcccggggaccagagtggatatcaaac

SEQ ID NO: 10918 - DNA, 31 bp, synthetic construct
  misc_feature 1..31: note = Synthetic construct
  source 1..31: mol_type = other DNA
ttcggcggtgggaccgagctgaccgtcctag

SEQ ID NO: 10919 - DNA, 31 bp, synthetic construct
  misc_feature 1..31: note = Synthetic construct
  source 1..31: mol_type = other DNA
ttcggcggagggaccaaggtggagatcactc

SEQ ID NO: 10920 - DNA, 31 bp, synthetic construct
  misc_feature 1..31: note = Synthetic construct
  source 1..31: mol_type = other DNA
ttcggccaggggaccaagttggagatcaaac

SEQ ID NO: 10921 - DNA, 31 bp, synthetic construct
  misc_feature 1..31: note = Synthetic construct
  source 1..31: mol_type = other DNA
ttcggacctgggaccaaggtcaccgtcctag

SEQ ID NO: 10922 - DNA, 31 bp, synthetic construct; identical to SEQ ID NO: 1860
  misc_feature 1..31: note = Synthetic construct
  source 1..31: mol_type = other DNA

SEQ ID NO: 10923 - DNA, 31 bp, synthetic construct
  misc_feature 1..31: note = Synthetic construct
  source 1..31: mol_type = other DNA
tttggccaggggaccagactggagatcaagc

SEQ ID NO: 10924 - DNA, 31 bp, synthetic construct
  misc_feature 1..31: note = Synthetic construct
  source 1..31: mol_type = other DNA
ttcggccaagggaccaaggtggaagtcagac

SEQ ID NO: 10925 - DNA, 31 bp, synthetic construct
  misc_feature 1..31: note = Synthetic construct
  source 1..31: mol_type = other DNA
ttcgggactgggaccaaggtcaccgtcctag

SEQ ID NO: 10926 - DNA, 31 bp, synthetic construct
  misc_feature 1..31: note = Synthetic construct
  source 1..31: mol_type = other DNA
ttcggccctgggaccagagtggagatcagac

SEQ ID NO: 10927 - DNA, 31 bp, synthetic construct
  misc_feature 1..31: note = Synthetic construct
  source 1..31: mol_type = other DNA
ttcggcggggggaccatcctggagatcagac

SEQ ID NO: 10928 - DNA, 31 bp, synthetic construct
  misc_feature 1..31: note = Synthetic construct
  source 1..31: mol_type = other DNA
tttggccaggggaccaaggtagagatcaaac

SEQ ID NO: 10929 - DNA, 31 bp, synthetic construct
  misc_feature 1..31: note = Synthetic construct
  source 1..31: mol_type = other DNA
tttggccaggggaccaagttggagagcaaac

SEQ ID NO: 10930 - DNA, 31 bp, synthetic construct
  misc_feature 1..31: note = Synthetic construct
  source 1..31: mol_type = other DNA
ttcggaactgggaccacggtcaccgtcctac

SEQ ID NO: 10931 - DNA, 31 bp, synthetic construct
  misc_feature 1..31: note = Synthetic construct
  source 1..31: mol_type = other DNA
ttcggccaagggacacgactggaaattaaac

SEQ ID NO: 10932 - DNA, 31 bp, synthetic construct
  misc_feature 1..31: note = Synthetic construct
  source 1..31: mol_type = other DNA
ttcggcggagggaccaaggtagagatcaaac

SEQ ID NO: 10933 - DNA, 31 bp, synthetic construct
  misc_feature 1..31: note = Synthetic construct
  source 1..31: mol_type = other DNA
tttggtggagggaccaggctgaccgtcgtag

SEQ ID NO: 10934 - DNA, 31 bp, synthetic construct
  misc_feature 1..31: note = Synthetic construct
  source 1..31: mol_type = other DNA
ttcggcggagggacctcggtggagagaaaac

SEQ ID NO: 10935 - DNA, 31 bp, synthetic construct
  misc_feature 1..31: note = Synthetic construct
  source 1..31: mol_type = other DNA
ttcggcggggggaccaaggtggagatcaaac

SEQ ID NO: 10936 - DNA, 31 bp, synthetic construct
  misc_feature 1..31: note = Synthetic construct
  source 1..31: mol_type = other DNA
tttggccgggggaccaagttggagatcaaac

SEQ ID NO: 10937 - DNA, 31 bp, synthetic construct
  misc_feature 1..31: note = Synthetic construct
  source 1..31: mol_type = other DNA
ttcggacctgggacccaggtcaccgtcctag

SEQ ID NO: 10938 - DNA, 31 bp, synthetic construct
  misc_feature 1..31: note = Synthetic construct
  source 1..31: mol_type = other DNA
ttcggacctgggaccaaggtcatcgtccttg

SEQ ID NO: 10939 - DNA, 31 bp, synthetic construct
  misc_feature 1..31: note = Synthetic construct
  source 1..31: mol_type = other DNA
ttcggccctgggaccaaggtggatatcaaac

SEQ ID NO: 10940 - DNA, 31 bp, synthetic construct
  misc_feature 1..31: note = Synthetic construct
  source 1..31: mol_type = other DNA
ttcggaagtgggaccaaggtcaccgtcctaa

SEQ ID NO: 10941 - DNA, 31 bp, synthetic construct
  misc_feature 1..31: note = Synthetic construct
  source 1..31: mol_type = other DNA
ttcggcggagggaccagggtggagatgaaac

SEQ ID NO: 10942 - DNA, 31 bp, synthetic construct
  misc_feature 1..31: note = Synthetic construct
  source 1..31: mol_type = other DNA
ttcggcggagggaccaagctcaccgtcctgg

SEQ ID NO: 10943 - DNA, 31 bp, synthetic construct
  misc_feature 1..31: note = Synthetic construct
  source 1..31: mol_type = other DNA
ttcggccaagggaccaagctggaaatcaaaa

SEQ ID NO: 10944 - DNA, 31 bp, synthetic construct
  misc_feature 1..31: note = Synthetic construct
  source 1..31: mol_type = other DNA
ttcggcggagggaccacggtggagatcaaac

SEQ ID NO: 10945 - DNA, 31 bp, synthetic construct
  misc_feature 1..31: note = Synthetic construct
  source 1..31: mol_type = other DNA
tttggcccggggaccaaggttgagatcaaac

SEQ ID NO: 10946 - DNA, 31 bp, synthetic construct
  misc_feature 1..31: note = Synthetic construct
  source 1..31: mol_type = other DNA
ttcggccaagggaccaaggtggaaatgaaac

SEQ ID NO: 10947 - DNA, 31 bp, synthetic construct
  misc_feature 1..31: note = Synthetic construct
  source 1..31: mol_type = other DNA
ttcggcggagggaccacggtggaaatcaaac

SEQ ID NO: 10948 - DNA, 31 bp, synthetic construct
  misc_feature 1..31: note = Synthetic construct
  source 1..31: mol_type = other DNA
ttcggcggatggaccaagttgaccgtcctag

SEQ ID NO: 10949 - DNA, 31 bp, synthetic construct
  misc_feature 1..31: note = Synthetic construct
  source 1..31: mol_type = other DNA
ttcgggacagggaccaaggtcaccgtcctag

SEQ ID NO: 10950 - DNA, 31 bp, synthetic construct
  misc_feature 1..31: note = Synthetic construct
  source 1..31: mol_type = other DNA
ttcggccctgggaccaaactggaaatcagcc

SEQ ID NO: 10951 - DNA, 31 bp, synthetic construct
  misc_feature 1..31: note = Synthetic construct
  source 1..31: mol_type = other DNA
ttcggccaagggaccaaagtggaattcaaac

SEQ ID NO: 10952 - DNA, 31 bp, synthetic construct
  misc_feature 1..31: note = Synthetic construct
  source 1..31: mol_type = other DNA
ttcggccaagggaccaaagttgattttaaac

SEQ ID NO: 10953 - DNA, 31 bp, synthetic construct
  misc_feature 1..31: note = Synthetic construct
  source 1..31: mol_type = other DNA
ttcggccctggaaccaaggttgatctcaagc

SEQ ID NO: 10954 - DNA, 31 bp, synthetic construct
  misc_feature 1..31: note = Synthetic construct
  source 1..31: mol_type = other DNA
tttggcggggggaccaagctgaccgtcctag

SEQ ID NO: 10955 - DNA, 31 bp, synthetic construct
  misc_feature 1..31: note = Synthetic construct
  source 1..31: mol_type = other DNA
ttcggcggagggaccaatgtagagatcaaac

SEQ ID NO: 10956 - DNA, 31 bp, synthetic construct
  misc_feature 1..31: note = Synthetic construct
  source 1..31: mol_type = other DNA
ttcggcggagggaccagggtggagatcaatc

SEQ ID NO: 10957 - DNA, 31 bp, synthetic construct
  misc_feature 1..31: note = Synthetic construct
  source 1..31: mol_type = other DNA
ttcggcggagggaccaagatgcagatcaaac

SEQ ID NO: 10958 - DNA, 31 bp, synthetic construct
  misc_feature 1..31: note = Synthetic construct
  source 1..31: mol_type = other DNA
ttcgcccaagggacacgactggagattaaac

SEQ ID NO: 10959 - DNA, 31 bp, synthetic construct
  misc_feature 1..31: note = Synthetic construct
  source 1..31: mol_type = other DNA
ttcggcggtgggaccaagctgaccgtcctag

SEQ ID NO: 10960 - DNA, 31 bp, synthetic construct
  misc_feature 1..31: note = Synthetic construct
  source 1..31: mol_type = other DNA
ttcggcagagggaccaagttgaccgtcctgc

SEQ ID NO: 10961 - DNA, 31 bp, synthetic construct
  misc_feature 1..31: note = Synthetic construct
  source 1..31: mol_type = other DNA
ttcggcggcgggaccaaggtggagatcaatc

SEQ ID NO: 10962 - DNA, 31 bp, synthetic construct
  misc_feature 1..31: note = Synthetic construct
  source 1..31: mol_type = other DNA
ttcggtcaagggaccaaggtggaaatcaaac

SEQ ID NO: 10963 - DNA, 31 bp, synthetic construct
  misc_feature 1..31: note = Synthetic construct
  source 1..31: mol_type = other DNA
ttcggcggagggaccaaggtggagttcaagc

SEQ ID NO: 10964 - DNA, 31 bp, synthetic construct
  misc_feature 1..31: note = Synthetic construct
  source 1..31: mol_type = other DNA
ttcggccaagggaccaaggtggagatcaaag

SEQ ID NO: 10965 - DNA, 31 bp, synthetic construct
  misc_feature 1..31: note = Synthetic construct
  source 1..31: mol_type = other DNA
tttggccaggggaccagcctggagatcaaaa

SEQ ID NO: 10966 - DNA, 31 bp, synthetic construct
  misc_feature 1..31: note = Synthetic construct
  source 1..31: mol_type = other DNA
tttggccaggggaccaaactggagatcaaag

SEQ ID NO: 10967 - DNA, 31 bp, synthetic construct
  misc_feature 1..31: note = Synthetic construct
  source 1..31: mol_type = other DNA
tttggccaggggaccaagctggaaatcaagc

SEQ ID NO: 10968 - DNA, 31 bp, synthetic construct
  misc_feature 1..31: note = Synthetic construct
  source 1..31: mol_type = other DNA
ttcggaactgggaccaaggtcaccgtcctcc

SEQ ID NO: 10969 - DNA, 31 bp, synthetic construct
  misc_feature 1..31: note = Synthetic construct
  source 1..31: mol_type = other DNA
ttcggcggagggaccaaggtggagatcaagc

SEQ ID NO: 10970 - DNA, 31 bp, synthetic construct
  misc_feature 1..31: note = Synthetic construct
  source 1..31: mol_type = other DNA
ttcggccaagggaccagggtggacgtcagac

SEQ ID NO: 10971 - DNA, 31 bp, synthetic construct
  misc_feature 1..31: note = Synthetic construct
  source 1..31: mol_type = other DNA
tttggccaggggaccaagctggagatcacgc

SEQ ID NO: 10972 - DNA, 31 bp, synthetic construct
  misc_feature 1..31: note = Synthetic construct
  source 1..31: mol_type = other DNA
ttcggcggagggaccaaggtgaccgtccttg

SEQ ID NO: 10973 - DNA, 31 bp, synthetic construct
  misc_feature 1..31: note = Synthetic construct
  source 1..31: mol_type = other DNA
ttcggaactgggaccaaactcaccgtcctag

SEQ ID NO: 10974 - DNA, 31 bp, synthetic construct
  misc_feature 1..31: note = Synthetic construct
  source 1..31: mol_type = other DNA
ttcggccctgggactaaagtgggtatcagac

SEQ ID NO: 10975 - DNA, 31 bp, synthetic construct
  misc_feature 1..31: note = Synthetic construct
  source 1..31: mol_type = other DNA
ttcggcctagggaccaagttggaaatcaaac

SEQ ID NO: 10976 - DNA, 31 bp, synthetic construct
  misc_feature 1..31: note = Synthetic construct
  source 1..31: mol_type = other DNA
ttcggccaagggaccaaggtggtactccaac

SEQ ID NO: 10977 - DNA, 31 bp, synthetic construct
  misc_feature 1..31: note = Synthetic construct
  source 1..31: mol_type = other DNA
ttcggcggagggaccaaactgaccgtccttg

SEQ ID NO: 10978 - DNA, 31 bp, synthetic construct
  misc_feature 1..31: note = Synthetic construct
  source 1..31: mol_type = other DNA
ttcggcggagggaccaagttgaccttcctag

SEQ ID NO: 10979 - DNA, 31 bp, synthetic construct
  misc_feature 1..31: note = Synthetic construct
  source 1..31: mol_type = other DNA
ttcggccgagggaccaaggtggaaatcaaac

SEQ ID NO: 10980 - DNA, 31 bp, synthetic construct
  misc_feature 1..31: note = Synthetic construct
  source 1..31: mol_type = other DNA
ttcggccctgggaccaaagtggatttgaaac

SEQ ID NO: 10981 - DNA, 31 bp, synthetic construct
  misc_feature 1..31: note = Synthetic construct
  source 1..31: mol_type = other DNA
ttcggccaagggaccaaggtggagctcaatc

SEQ ID NO: 10982 - skipped

SEQ ID NO: 10983 - DNA, 31 bp, synthetic construct
  misc_feature 1..31: note = Synthetic construct
  source 1..31: mol_type = other DNA
ttcggccaagggaccaagttggaaatcaaac

SEQ ID NO: 10984 - DNA, 31 bp, synthetic construct
  misc_feature 1..31: note = Synthetic construct
  source 1..31: mol_type = other DNA
tttggcggagggaccaagttgaccgtcctac

SEQ ID NO: 10985 - DNA, 31 bp, synthetic construct
  misc_feature 1..31: note = Synthetic construct
  source 1..31: mol_type = other DNA
ttcggccaggggaccagggtggaaatcaagc

SEQ ID NO: 10986 - DNA, 31 bp, synthetic construct
  misc_feature 1..31: note = Synthetic construct
  source 1..31: mol_type = other DNA
ttcggccctgggaccaaagtggatttcaaac

SEQ ID NO: 10987 - DNA, 31 bp, synthetic construct
  misc_feature 1..31: note = Synthetic construct
  source 1..31: mol_type = other DNA
ttcggccctgggaccaaagtggatatcaaag

SEQ ID NO: 10988 - DNA, 31 bp, synthetic construct
  misc_feature 1..31: note = Synthetic construct
  source 1..31: mol_type = other DNA
tttggccaggggaccaagctggaggtcaaac

SEQ ID NO: 10989 - DNA, 31 bp, synthetic construct
  misc_feature 1..31: note = Synthetic construct
  source 1..31: mol_type = other DNA
ttcggccctgggaccaaaatagatattaaac

SEQ ID NO: 10990 - DNA, 31 bp, synthetic construct
  misc_feature 1..31: note = Synthetic construct
  source 1..31: mol_type = other DNA
ttcggcggtgggaccaaggtggagatcaagc

SEQ ID NO: 10991 - DNA, 31 bp, synthetic construct
  misc_feature 1..31: note = Synthetic construct
  source 1..31: mol_type = other DNA
ttcggacctggcaccaaagtcaccgtcctgg

SEQ ID NO: 10992 - DNA, 31 bp, synthetic construct
  misc_feature 1..31: note = Synthetic construct
  source 1..31: mol_type = other DNA
ttcggcggagggaccaagttgaccgtcctgg

SEQ ID NO: 10993 - DNA, 31 bp, synthetic construct
  misc_feature 1..31: note = Synthetic construct
  source 1..31: mol_type = other DNA
ttcggcggagggaccaagctgaccgtcctta

SEQ ID NO: 10994 - DNA, 31 bp, synthetic construct
  misc_feature 1..31: note = Synthetic construct
  source 1..31: mol_type = other DNA
ttcggccctgggaccaaggtggatctcaaac

SEQ ID NO: 10995 - DNA, 31 bp, synthetic construct
  misc_feature 1..31: note = Synthetic construct
  source 1..31: mol_type = other DNA
ttcggcggagggaccagggtggagatcaacc

SEQ ID NO: 10996 - DNA, 31 bp, synthetic construct
  misc_feature 1..31: note = Synthetic construct
  source 1..31: mol_type = other DNA
ttcggccaagggaccaaggtggaattgaaac

SEQ ID NO: 10997 - DNA, 31 bp, synthetic construct
  misc_feature 1..31: note = Synthetic construct
  source 1..31: mol_type = other DNA
ttcggcggagggacccagttgaccgtcctag

SEQ ID NO: 10998 - DNA, 31 bp, synthetic construct
  misc_feature 1..31: note = Synthetic construct
  source 1..31: mol_type = other DNA
ttcggccaagggaccaaggtggaggtccaac

SEQ ID NO: 10999 - DNA, 31 bp, synthetic construct
  misc_feature 1..31: note = Synthetic construct
  source 1..31: mol_type = other DNA
ttcggccaagggacacgactggagcttaatc

SEQ ID NO: 11000 - DNA, 31 bp, synthetic construct
  misc_feature 1..31: note = Synthetic construct
  source 1..31: mol_type = other DNA
ttcgggtctgggaccacggtcgccgtcctcg

SEQ ID NO: 11001 - DNA, 31 bp, synthetic construct
  misc_feature 1..31: note = Synthetic construct
  source 1..31: mol_type = other DNA
tttggtcaggggaccaagctggagatcagac

SEQ ID NO: 11002 - DNA, 31 bp, synthetic construct
  misc_feature 1..31: note = Synthetic construct
  source 1..31: mol_type = other DNA
tttggccaggggaccaagctggggatcaaac

SEQ ID NO: 11003 - DNA, 31 bp, synthetic construct
  misc_feature 1..31: note = Synthetic construct
  source 1..31: mol_type = other DNA
tttggccaggggaccaagctggagatcagag

SEQ ID NO: 11004 - DNA, 31 bp, synthetic construct
  misc_feature 1..31: note = Synthetic construct
  source 1..31: mol_type = other DNA
ttcggaactggcaccaaggtcaccgtcctgc

SEQ ID NO: 11005 - DNA, 31 bp, synthetic construct
  misc_feature 1..31: note = Synthetic construct
  source 1..31: mol_type = other DNA
ttcggaggtgggaccaagatcaccgtcgtag

SEQ ID NO: 11006 - DNA, 31 bp, synthetic construct
  misc_feature 1..31: note = Synthetic construct
  source 1..31: mol_type = other DNA
ttcggcggcgggaccaaggtgaccgtcctag

SEQ ID NO: 11007 - DNA, 31 bp, synthetic construct
  misc_feature 1..31: note = Synthetic construct
  source 1..31: mol_type = other DNA
ttcggccctgggaccaaagtggatatcagac

SEQ ID NO: 11008 - DNA, 31 bp, synthetic construct
  misc_feature 1..31: note = Synthetic construct
  source 1..31: mol_type = other DNA
ttcggaactgggaccaaggtcaccgtcctgg

SEQ ID NO: 11009 - DNA, 31 bp, synthetic construct
  misc_feature 1..31: note = Synthetic construct
  source 1..31: mol_type = other DNA
ttcggacctgggaccagggtctccgtcctag

SEQ ID NO: 11010 - DNA, 31 bp, synthetic construct
  misc_feature 1..31: note = Synthetic construct
  source 1..31: mol_type = other DNA
ttcggccaagggaccaaggttgagatcaaac

SEQ ID NO: 11011 - DNA, 31 bp, synthetic construct
  misc_feature 1..31: note = Synthetic construct
  source 1..31: mol_type = other DNA
ttcggaacaggaaccacggtcaccgtcctac

SEQ ID NO: 11012 - DNA, 31 bp, synthetic construct
  misc_feature 1..31: note = Synthetic construct
  source 1..31: mol_type = other DNA
ttcggccaagggaccaaggtggaggtcaaac

SEQ ID NO: 11013 - DNA, 31 bp, synthetic construct
  misc_feature 1..31: note = Synthetic construct
  source 1..31: mol_type = other DNA
tttggccaggggaccaagctggacatcaagc

SEQ ID NO: 11014 - DNA, 31 bp, synthetic construct
  misc_feature 1..31: note = Synthetic construct
  source 1..31: mol_type = other DNA
ttcggcggcgggaccaagttgaccgtcctgg

SEQ ID NO: 11015 - DNA, 31 bp, synthetic construct
  misc_feature 1..31: note = Synthetic construct
  source 1..31: mol_type = other DNA
ttcggccaggggaccaaggtggaagtcagac

SEQ ID NO: 11016 - DNA, 31 bp, synthetic construct; identical to SEQ ID NO: 1864
  misc_feature 1..31: note = Synthetic construct
  source 1..31: mol_type = other DNA

SEQ ID NO: 11017 - DNA, 31 bp, synthetic construct
  misc_feature 1..31: note = Synthetic construct
  source 1..31: mol_type = other DNA
tttggcggagggaccaagttgaccgtcctag

SEQ ID NO: 11018 - DNA, 31 bp, synthetic construct
  misc_feature 1..31: note = Synthetic construct
  source 1..31: mol_type = other DNA
ttcggccctgggaccaaagtggatatcaacc

SEQ ID NO: 11019 - DNA, 31 bp, synthetic construct
  misc_feature 1..31: note = Synthetic construct
  source 1..31: mol_type = other DNA
ttcggacctgggacgaagctcaccgtcctag

SEQ ID NO: 11020 - DNA, 31 bp, synthetic construct
  misc_feature 1..31: note = Synthetic construct
  source 1..31: mol_type = other DNA
ttcggaactgggaccaaggtcaccgtcatgg

SEQ ID NO: 11021 - DNA, 31 bp, synthetic construct
  misc_feature 1..31: note = Synthetic construct
  source 1..31: mol_type = other DNA
ttcggaactggaaccaaggtcaccgtcctag

SEQ ID NO: 11022 - DNA, 31 bp, synthetic construct
  misc_feature 1..31: note = Synthetic construct
  source 1..31: mol_type = other DNA
tttggccaggggaccaggttggagatcaaac

SEQ ID NO: 11023 - DNA, 21 bp, synthetic construct
  misc_feature 1..21: note = Synthetic construct
  source 1..21: mol_type = other DNA
cagagtgttagcagcaggtac

SEQ ID NO: 11024 - DNA, 18 bp, synthetic construct
  misc_feature 1..18: note = Synthetic construct
  source 1..18: mol_type = other DNA
gagggtataagtaactac

SEQ ID NO: 11025 - DNA, 27 bp, synthetic construct
  misc_feature 1..27: note = Synthetic construct
  source 1..27: mol_type = other DNA
agcagtgacgttggtggttataactat

SEQ ID NO: 11026 - DNA, 18 bp, synthetic construct
  misc_feature 1..18: note = Synthetic construct
  source 1..18: mol_type = other DNA
gatgatcttgacaatcat

SEQ ID NO: 11027 - DNA, 21 bp, synthetic construct
  misc_feature 1..21: note = Synthetic construct
  source 1..21: mol_type = other DNA
cagggtgttcacagcaacact

SEQ ID NO: 11028 - DNA, 21 bp, synthetic construct
  misc_feature 1..21: note = Synthetic construct
  source 1..21: mol_type = other DNA
cagagtcttagcaacacctcg

SEQ ID NO: 11029 - DNA, 27 bp, synthetic construct
  misc_feature 1..27: note = Synthetic construct
  source 1..27: mol_type = other DNA
actggagctgtcaccagtggtcattat

SEQ ID NO: 11030 - DNA, 27 bp, synthetic construct
  misc_feature 1..27: note = Synthetic construct
  source 1..27: mol_type = other DNA
agccgtgatgttggtgttcataagtct

SEQ ID NO: 11031 - DNA, 21 bp, synthetic construct
  misc_feature 1..21: note = Synthetic construct
  source 1..21: mol_type = other DNA
cagagtgttagcagcaattac

SEQ ID NO: 11032 - DNA, 18 bp, synthetic construct
  misc_feature 1..18: note = Synthetic construct
  source 1..18: mol_type = other DNA
cagagtgttagtacctgg

SEQ ID NO: 11033 - DNA, 27 bp, synthetic construct
  misc_feature 1..27: note = Synthetic construct
  source 1..27: mol_type = other DNA
agcagtgacgttggtggttataaatat

SEQ ID NO: 11034 - DNA, 36 bp, synthetic construct
  misc_feature 1..36: note = Synthetic construct
  source 1..36: mol_type = other DNA
cagagtgttttatacagctccaacaataagacctac

SEQ ID NO: 11035 - DNA, 18 bp, synthetic construct
  misc_feature 1..18: note = Synthetic construct
  source 1..18: mol_type = other DNA
ggattgccaaaacaatat

SEQ ID NO: 11036 - DNA, 18 bp, synthetic construct
  misc_feature 1..18: note = Synthetic construct
  source 1..18: mol_type = other DNA
cagactctttacacccac

SEQ ID NO: 11037 - DNA, 30 bp, synthetic construct
  misc_feature 1..30: note = Synthetic construct
  source 1..30: mol_type = other DNA
cagaatgttttatacgacaataagaactac

SEQ ID NO: 11038 - DNA, 21 bp, synthetic construct
  misc_feature 1..21: note = Synthetic construct
  source 1..21: mol_type = other DNA
cagagtgttagcagcacctac

SEQ ID NO: 11039 - DNA, 27 bp, synthetic construct
  misc_feature 1..27: note = Synthetic construct
  source 1..27: mol_type = other DNA
tgcagtgacgttggtggttataactat

SEQ ID NO: 11040 - DNA, 36 bp, synthetic construct
  misc_feature 1..36: note = Synthetic construct
  source 1..36: mol_type = other DNA
cagagtgttttatacaggtccaagaatcagaactac

SEQ ID NO: 11041 - DNA, 27 bp, synthetic construct
  misc_feature 1..27: note = Synthetic construct
  source 1..27: mol_type = other DNA
agctccaacatcggggcaggttatgat

SEQ ID NO: 11042 - DNA, 27 bp, synthetic construct
  misc_feature 1..27: note = Synthetic construct
  source 1..27: mol_type = other DNA
agcagtgacgtcggtggttataactat

SEQ ID NO: 11043 - DNA, 36 bp, synthetic construct
  misc_feature 1..36: note = Synthetic construct
  source 1..36: mol_type = other DNA
cagagtgttttatacacctccaacaatgagcactac

SEQ ID NO: 11044 - DNA, 18 bp, synthetic construct
  misc_feature 1..18: note = Synthetic construct
  source 1..18: mol_type = other DNA
agcctcagaaaccattat

SEQ ID NO: 11045 - DNA, 24 bp, synthetic construct
  misc_feature 1..24: note = Synthetic construct
  source 1..24: mol_type = other DNA
agtggcagtattggcagcaacttt

SEQ ID NO: 11046 - DNA, 36 bp, synthetic construct
  misc_feature 1..36: note = Synthetic construct
  source 1..36: mol_type = other DNA
cagagtcttttatatagcgccaccgagaggacctac

SEQ ID NO: 11047 - DNA, 18 bp, synthetic construct
  misc_feature 1..18: note = Synthetic construct
  source 1..18: mol_type = other DNA
cagaacatcgagactgcc

SEQ ID NO: 11048 - DNA, 21 bp, synthetic construct
  misc_feature 1..21: note = Synthetic construct
  source 1..21: mol_type = other DNA
cagcctgttaccagcggctac

SEQ ID NO: 11049 - DNA, 21 bp, synthetic construct
  misc_feature 1..21: note = Synthetic construct
  source 1..21: mol_type = other DNA
cggagtgttaccagcgactac

SEQ ID NO: 11050 - DNA, 21 bp, synthetic construct
  misc_feature 1..21: note = Synthetic construct
  source 1..21: mol_type = other DNA
cagagtgtgagcagcacctac

SEQ ID NO: 11051 - DNA, 21 bp, synthetic construct
  misc_feature 1..21: note = Synthetic construct
  source 1..21: mol_type = other DNA
cagactgttagcagcaggtac

SEQ ID NO: 11052 - DNA, 18 bp, synthetic construct
  misc_feature 1..18: note = Synthetic construct
  source 1..18: mol_type = other DNA
aactttgaaactacagat

SEQ ID NO: 11053 - DNA, 24 bp, synthetic construct
  misc_feature 1..24: note = Synthetic construct
  source 1..24: mol_type = other DNA
agctccaacatcggaagtaatgtt

SEQ ID NO: 11054 - DNA, 18 bp, synthetic construct
  misc_feature 1..18: note = Synthetic construct
  source 1..18: mol_type = other DNA
cagaatattggcaggtat

SEQ ID NO: 11055 - DNA, 27 bp, synthetic construct
  misc_feature 1..27: note = Synthetic construct
  source 1..27: mol_type = other DNA
agcggtgatgttgtaaattatgtcctt

SEQ ID NO: 11056 - DNA, 33 bp, synthetic construct
  misc_feature 1..33: note = Synthetic construct
  source 1..33: mol_type = other DNA
gagagtctcctgtatagtgatggaaagacttat

SEQ ID NO: 11057 - DNA, 18 bp, synthetic construct
  misc_feature 1..18: note = Synthetic construct
  source 1..18: mol_type = other DNA
cagggcattagcagttat

SEQ ID NO: 11058 - DNA, 18 bp, synthetic construct
  misc_feature 1..18: note = Synthetic construct
  source 1..18: mol_type = other DNA
cagggtattagcagttat

SEQ ID NO: 11059 - DNA, 18 bp, synthetic construct
  misc_feature 1..18: note = Synthetic construct
  source 1..18: mol_type = other DNA
gcattgccaggcaattat

SEQ ID NO: 11060 - DNA, 24 bp, synthetic construct
  misc_feature 1..24: note = Synthetic construct
  source 1..24: mol_type = other DNA
agctccaacatcggaagtaattat

SEQ ID NO: 11061 - DNA, 18 bp, synthetic construct
  misc_feature 1..18: note = Synthetic construct
  source 1..18: mol_type = other DNA
cagagtattagtagctgg

SEQ ID NO: 11062 - DNA, 27 bp, synthetic construct
  misc_feature 1..27: note = Synthetic construct
  source 1..27: mol_type = other DNA
agcagagatgttgggagttataacctt

SEQ ID NO: 11063 - DNA, 18 bp, synthetic construct
  misc_feature 1..18: note = Synthetic construct
  source 1..18: mol_type = other DNA
cagggaattagcatctgg

SEQ ID NO: 11064 - DNA, 21 bp, synthetic construct
  misc_feature 1..21: note = Synthetic construct
  source 1..21: mol_type = other DNA
agcggctacagcacttataaa

SEQ ID NO: 11065 - DNA, 18 bp, synthetic construct
  misc_feature 1..18: note = Synthetic construct
  source 1..18: mol_type = other DNA
caggacattgacaattat

SEQ ID NO: 11066 - DNA, 21 bp, synthetic construct
  misc_feature 1..21: note = Synthetic construct
  source 1..21: mol_type = other DNA
cagagtgtaagcagcagcttc

SEQ ID NO: 11067 - DNA, 36 bp, synthetic construct
  misc_feature 1..36: note = Synthetic construct
  source 1..36: mol_type = other DNA
cagagtcttttatacagctccgacaaaaagaactac

SEQ ID NO: 11068 - DNA, 36 bp, synthetic construct
  misc_feature 1..36: note = Synthetic construct
  source 1..36: mol_type = other DNA
cagagtgttttatacagctccaacaataagaactac

SEQ ID NO: 11069 - DNA, 33 bp, synthetic construct
  misc_feature 1..33: note = Synthetic construct
  source 1..33: mol_type = other DNA
caaagcctcctacacagtgatggaaacacctac

SEQ ID NO: 11070 - DNA, 36 bp, synthetic construct; identical to SEQ ID NO: 1868
  misc_feature 1..36: note = Synthetic construct
  source 1..36: mol_type = other DNA

SEQ ID NO: 11071 - DNA, 27 bp, synthetic construct
  misc_feature 1..27: note = Synthetic construct
  source 1..27: mol_type = other DNA
agcagtgacgttggtacttttaagtat

SEQ ID NO: 11072 - DNA, 27 bp, synthetic construct
  misc_feature 1..27: note = Synthetic construct
  source 1..27: mol_type = other DNA
acctcaaacatcggggcaggttatgat

SEQ ID NO: 11073 - DNA, 27 bp, synthetic construct
  misc_feature 1..27: note = Synthetic construct
  source 1..27: mol_type = other DNA
agcagtgatgttgggagttataacctt

SEQ ID NO: 11074 - DNA, 18 bp, synthetic construct
  misc_feature 1..18: note = Synthetic construct
  source 1..18: mol_type = other DNA
aacattggaagtaaaagt

SEQ ID NO: 11075 - DNA, 18 bp, synthetic construct
  misc_feature 1..18: note = Synthetic construct
  source 1..18: mol_type = other DNA
cagagtgttggcagctcc

SEQ ID NO: 11076 - DNA, 33 bp, synthetic construct
  misc_feature 1..33: note = Synthetic construct
  source 1..33: mol_type = other DNA
caaagcctcgtatacagtgatggaaacacctac

SEQ ID NO: 11077 - DNA, 18 bp, synthetic construct
  misc_feature 1..18: note = Synthetic construct
  source 1..18: mol_type = other DNA
cggagtattagcaatacc

SEQ ID NO: 11078 - DNA, 21 bp, synthetic construct
  misc_feature 1..21: note = Synthetic construct
  source 1..21: mol_type = other DNA
agtggacacgacacctacgcc

SEQ ID NO: 11079 - DNA, 21 bp, synthetic construct
  misc_feature 1..21: note = Synthetic construct
  source 1..21: mol_type = other DNA
ccgcgtcttagcagcacctac

SEQ ID NO: 11080 - DNA, 18 bp, synthetic construct
  misc_feature 1..18: note = Synthetic construct
  source 1..18: mol_type = other DNA
cagagtgttgacaagttc

SEQ ID NO: 11081 - DNA, 21 bp, synthetic construct
  misc_feature 1..21: note = Synthetic construct
  source 1..21: mol_type = other DNA
cagaatgttaattggcgctac

SEQ ID NO: 11082 - DNA, 33 bp, synthetic construct
  misc_feature 1..33: note = Synthetic construct
  source 1..33: mol_type = other DNA
caaagcctcgttcacactgatggaaacacctac

SEQ ID NO: 11083 - DNA, 27 bp, synthetic construct
  misc_feature 1..27: note = Synthetic construct
  source 1..27: mol_type = other DNA
aacagtgatgttgggagttataacctt

SEQ ID NO: 11084 - DNA, 36 bp, synthetic construct
  misc_feature 1..36: note = Synthetic construct
  source 1..36: mol_type = other DNA
ccgagtgtcttgtacacctccgacaaaaagaactac

SEQ ID NO: 11085 - DNA, 18 bp, synthetic construct
  misc_feature 1..18: note = Synthetic construct
  source 1..18: mol_type = other DNA
cagagtattagcacctcc

SEQ ID NO: 11086 - DNA, 18 bp, synthetic construct
  misc_feature 1..18: note = Synthetic construct
  source 1..18: mol_type = other DNA
caggacattagaaatgat

SEQ ID NO: 11087 - DNA, 18 bp, synthetic construct
  misc_feature 1..18: note = Synthetic construct
  source 1..18: mol_type = other DNA
caaagtgttagcaccaac

SEQ ID NO: 11088 - DNA, 33 bp, synthetic construct
  misc_feature 1..33: note = Synthetic construct
  source 1..33: mol_type = other DNA
caaagcctcgtacacagtgatggaaacatgtac

SEQ ID NO: 11089 - DNA, 33 bp, synthetic construct
  misc_feature 1..33: note = Synthetic construct
  source 1..33: mol_type = other DNA
caaagcctcgtacacagtgatggaaacacctac

SEQ ID NO: 11090 - DNA, 18 bp, synthetic construct
  misc_feature 1..18: note = Synthetic construct
  source 1..18: mol_type = other DNA
caggacatcactaacttt

SEQ ID NO: 11091 - DNA, 18 bp, synthetic construct
  misc_feature 1..18: note = Synthetic construct
  source 1..18: mol_type = other DNA
caggacataaccaaatat

SEQ ID NO: 11092 - DNA, 18 bp, synthetic construct
  misc_feature 1..18: note = Synthetic construct
  source 1..18: mol_type = other DNA
caggacattagcacttct

SEQ ID NO: 11093 - DNA, 18 bp, synthetic construct
  misc_feature 1..18: note = Synthetic construct
  source 1..18: mol_type = other DNA
cagagtattgacaccttc

SEQ ID NO: 11094 - DNA, 18 bp, synthetic construct
  misc_feature 1..18: note = Synthetic construct
  source 1..18: mol_type = other DNA
cagagcattagcagtttt

SEQ ID NO: 11095 - DNA, 18 bp, synthetic construct
  misc_feature 1..18: note = Synthetic construct
  source 1..18: mol_type = other DNA
cagaccattatcacctat

SEQ ID NO: 11096 - DNA, 18 bp, synthetic construct
  misc_feature 1..18: note = Synthetic construct
  source 1..18: mol_type = other DNA
cagagcattagcagctat

SEQ ID NO: 11097 - DNA, 18 bp, synthetic construct
  misc_feature 1..18: note = Synthetic construct
  source 1..18: mol_type = other DNA
cagagcattagtaattat

SEQ ID NO: 11098 - DNA, 18 bp, synthetic construct
  misc_feature 1..18: note = Synthetic construct
  source 1..18: mol_type = other DNA
caagacattaagaactac

SEQ ID NO: 11099 - DNA, 21 bp, synthetic construct
  misc_feature 1..21: note = Synthetic construct
  source 1..21: mol_type = other DNA
cagagtgtgagttccagttac

SEQ ID NO: 11100 - DNA, 21 bp, synthetic construct
  misc_feature 1..21: note = Synthetic construct
  source 1..21: mol_type = other DNA
cagagtgttaacagcaactac

SEQ ID NO: 11101 - DNA, 21 bp, synthetic construct
  misc_feature 1..21: note = Synthetic construct
  source 1..21: mol_type = other DNA
cagagtgttagcagcagctac

SEQ ID NO: 11102 - DNA, 18 bp, synthetic construct
  misc_feature 1..18: note = Synthetic construct
  source 1..18: mol_type = other DNA
caggatattagcagatac

SEQ ID NO: 11103 - DNA, 18 bp, synthetic construct
  misc_feature 1..18: note = Synthetic construct
  source 1..18: mol_type = other DNA
cagagtgttagtgattgg

SEQ ID NO: 11104 - DNA, 18 bp, synthetic construct
  misc_feature 1..18: note = Synthetic construct
  source 1..18: mol_type = other DNA
cagagtgttagaaccaac

SEQ ID NO: 11105 - DNA, 18 bp, synthetic construct
  misc_feature 1..18: note = Synthetic construct
  source 1..18: mol_type = other DNA
cagagtgttggcagcaac

SEQ ID NO: 11106 - DNA, 18 bp, synthetic construct
  misc_feature 1..18: note = Synthetic construct
  source 1..18: mol_type = other DNA
cagagtgttagcagcaac

SEQ ID NO: 11107 - DNA, 18 bp, synthetic construct
  misc_feature 1..18: note = Synthetic construct
  source 1..18: mol_type = other DNA
caaagtgttagcagcaac

SEQ ID NO: 11108 - DNA, 21 bp, synthetic construct
  misc_feature 1..21: note = Synthetic construct
  source 1..21: mol_type = other DNA
cagagtgttagcagcaactac

SEQ ID NO: 11109 - DNA, 36 bp, synthetic construct
  misc_feature 1..36: note = Synthetic construct
  source 1..36: mol_type = other DNA
cagagtgttttatccagaatcaacgataagaattac

SEQ ID NO: 11110 - DNA, 36 bp, synthetic construct
  misc_feature 1..36: note = Synthetic construct
  source 1..36: mol_type = other DNA
cagagtcttttctacagctccaacaataagacctac

SEQ ID NO: 11111 - DNA, 36 bp, synthetic construct
  misc_feature 1..36: note = Synthetic construct
  source 1..36: mol_type = other DNA
cagactgttttatacacctccactaataagaacttc

SEQ ID NO: 11112 - DNA, 18 bp, synthetic construct
  misc_feature 1..18: note = Synthetic construct
  source 1..18: mol_type = other DNA
gcattgccaaagcaatat

SEQ ID NO: 11113 - DNA, 18 bp, synthetic construct
  misc_feature 1..18: note = Synthetic construct
  source 1..18: mol_type = other DNA
agcctcagaaggtattat

SEQ ID NO: 11114 - DNA, 18 bp, synthetic construct
  misc_feature 1..18: note = Synthetic construct
  source 1..18: mol_type = other DNA
gcattgtcaaagcaatat

SEQ ID NO: 11115 - DNA, 27 bp, synthetic construct
  misc_feature 1..27: note = Synthetic construct
  source 1..27: mol_type = other DNA
agcagtgacgttggtggttataagtat

SEQ ID NO: 11116 - DNA, 27 bp, synthetic construct
  misc_feature 1..27: note = Synthetic construct
  source 1..27: mol_type = other DNA
agcagtgacgttggtagttataactat

SEQ ID NO: 11117 - DNA, 27 bp, synthetic construct
  misc_feature 1..27: note = Synthetic construct
  source 1..27: mol_type = other DNA
agcagtgacgttggtgtttataactat

SEQ ID NO: 11118 - DNA, 27 bp, synthetic construct
  misc_feature 1..27: note = Synthetic construct
  source 1..27: mol_type = other DNA
agtagtgacgttggtggttataactat

SEQ ID NO: 11119 - DNA, 27 bp, synthetic construct
  misc_feature 1..27: note = Synthetic construct
  source 1..27: mol_type = other DNA
agcagtgacgttggtgcttataagtat

SEQ ID NO: 11120 - DNA, 27 bp, synthetic construct
  misc_feature 1..27: note = Synthetic construct
  source 1..27: mol_type = other DNA
agcagtgacgttggtgcttataactat

SEQ ID NO: 11121 - DNA, 27 bp, synthetic construct
  misc_feature 1..27: note = Synthetic construct
  source 1..27: mol_type = other DNA
agtagtgacgttggtgcttataactat

SEQ ID NO: 11122 - DNA, 18 bp, synthetic construct
  misc_feature 1..18: note = Synthetic construct
  source 1..18: mol_type = other DNA
cagggcattgccaactat

SEQ ID NO: 11123 - DNA, 21 bp, synthetic construct
  misc_feature 1..21: note = Synthetic construct
  source 1..21: mol_type = other DNA
cagagtgttagcacctcctac

SEQ ID NO: 11124 - DNA, 36 bp, synthetic construct
  misc_feature 1..36: note = Synthetic construct
  source 1..36: mol_type = other DNA
cagagtgttttatacagctccaacaataggcattac

SEQ ID NO: 11125 - DNA, 21 bp, synthetic construct
  misc_feature 1..21: note = Synthetic construct
  source 1..21: mol_type = other DNA
cagagtcttaccaccaactac

SEQ ID NO: 11126 - DNA, 21 bp, synthetic construct
  misc_feature 1..21: note = Synthetic construct
  source 1..21: mol_type = other DNA
caggctattagtagcagtaag

SEQ ID NO: 11127 - DNA, 18 bp, synthetic construct
  misc_feature 1..18: note = Synthetic construct
  source 1..18: mol_type = other DNA
cagagtgttagcagctac

SEQ ID NO: 11128 - DNA, 18 bp, synthetic construct
  misc_feature 1..18: note = Synthetic construct
  source 1..18: mol_type = other DNA
agcctcagaagctattat

SEQ ID NO: 11129 - DNA, 18 bp, synthetic construct
  misc_feature 1..18: note = Synthetic construct
  source 1..18: mol_type = other DNA
aacattggaactaaaagt

SEQ ID NO: 11130 - DNA, 18 bp, synthetic construct
  misc_feature 1..18: note = Synthetic construct
  source 1..18: mol_type = other DNA
cagagtgttagtagcaac

SEQ ID NO: 11131 - DNA, 24 bp, synthetic construct
  misc_feature 1..24: note = Synthetic construct
  source 1..24: mol_type = other DNA
agctccaacatcggtactaaatat

SEQ ID NO: 11132 - DNA, 36 bp, synthetic construct
  misc_feature 1..36: note = Synthetic construct
  source 1..36: mol_type = other DNA
cagagcctcttggatagtgatgatggaaacacctat

SEQ ID NO: 11133 - DNA, 27 bp, synthetic construct
  misc_feature 1..27: note = Synthetic construct
  source 1..27: mol_type = other DNA
agcagtgatgttggtggttataactat

SEQ ID NO: 11134 - DNA, 18 bp, synthetic construct
  misc_feature 1..18: note = Synthetic construct
  source 1..18: mol_type = other DNA
gaattgccagaccaattt

SEQ ID NO: 11135 - DNA, 27 bp, synthetic construct
  misc_feature 1..27: note = Synthetic construct
  source 1..27: mol_type = other DNA
agcagtgacgttggtgggtataactat

SEQ ID NO: 11136 - DNA, 24 bp, synthetic construct
  misc_feature 1..24: note = Synthetic construct
  source 1..24: mol_type = other DNA
agcggcagcattaccagcagcttt

SEQ ID NO: 11137 - DNA, 18 bp, synthetic construct
  misc_feature 1..18: note = Synthetic construct
  source 1..18: mol_type = other DNA
cagggctttagtaattct

SEQ ID NO: 11138 - DNA, 18 bp, synthetic construct
  misc_feature 1..18: note = Synthetic construct
  source 1..18: mol_type = other DNA
cagggcattaacattgat

SEQ ID NO: 11139 - DNA, 18 bp, synthetic construct
  misc_feature 1..18: note = Synthetic construct
  source 1..18: mol_type = other DNA
cagagtattagtagttgg

SEQ ID NO: 11140 - DNA, 36 bp, synthetic construct
  misc_feature 1..36: note = Synthetic construct
  source 1..36: mol_type = other DNA
cagagtgtcttatacagctccaacaataagaactac

SEQ ID NO: 11141 - DNA, 21 bp, synthetic construct
  misc_feature 1..21: note = Synthetic construct
  source 1..21: mol_type = other DNA
cagagtgttaacagtaactat

SEQ ID NO: 11142 - DNA, 18 bp, synthetic construct
  misc_feature 1..18: note = Synthetic construct
  source 1..18: mol_type = other DNA
cagagtattggtacttgg

SEQ ID NO: 11143 - DNA, 18 bp, synthetic construct
  misc_feature 1..18: note = Synthetic construct
  source 1..18: mol_type = other DNA
gtgttggcaaaaaaatat

SEQ ID NO: 11144 - DNA, 18 bp, synthetic construct
  misc_feature 1..18: note = Synthetic construct
  source 1..18: mol_type = other DNA
agaatggggactaggctt

SEQ ID NO: 11145 - DNA, 21 bp, synthetic construct
  misc_feature 1..21: note = Synthetic construct
  source 1..21: mol_type = other DNA
cagagtgtgagcaacaactac

SEQ ID NO: 11146 - DNA, 18 bp, synthetic construct
  misc_feature 1..18: note = Synthetic construct
  source 1..18: mol_type = other DNA
cagagtattaggagtgac

SEQ ID NO: 11147 - DNA, 18 bp, synthetic construct
  misc_feature 1..18: note = Synthetic construct
  source 1..18: mol_type = other DNA
caggccattagcaatgat

SEQ ID NO: 11148 - DNA, 21 bp, synthetic construct
  misc_feature 1..21: note = Synthetic construct
  source 1..21: mol_type = other DNA
cagagtattagtggtacctac

SEQ ID NO: 11149 - DNA, 18 bp, synthetic construct
  misc_feature 1..18: note = Synthetic construct
  source 1..18: mol_type = other DNA
cagagtattagtacctgg

SEQ ID NO: 11150 - DNA, 24 bp, synthetic construct
  misc_feature 1..24: note = Synthetic construct
  source 1..24: mol_type = other DNA
agttccaacatcggaagtaacgct

SEQ ID NO: 11151 - DNA, 18 bp, synthetic construct
  misc_feature 1..18: note = Synthetic construct
  source 1..18: mol_type = other DNA
gtactggcaaaaaaacat

SEQ ID NO: 11152 - DNA, 18 bp, synthetic construct
  misc_feature 1..18: note = Synthetic construct
  source 1..18: mol_type = other DNA
gctttgccaaagcaatat

SEQ ID NO: 11153 - DNA, 27 bp, synthetic construct
  misc_feature 1..27: note = Synthetic construct
  source 1..27: mol_type = other DNA
agcagtgacgttggtgactataagtat

SEQ ID NO: 11154 - DNA, 18 bp, synthetic construct
  misc_feature 1..18: note = Synthetic construct
  source 1..18: mol_type = other DNA
cagagtattaatagttgg

SEQ ID NO: 11155 - DNA, 27 bp, synthetic construct
  misc_feature 1..27: note = Synthetic construct
  source 1..27: mol_type = other DNA
ggctccaacatcggggctcctcatgat

SEQ ID NO: 11156 - DNA, 33 bp, synthetic construct
  misc_feature 1..33: note = Synthetic construct
  source 1..33: mol_type = other DNA
cagagcctcctggaagtaaatggaaacacctat

SEQ ID NO: 11157 - DNA, 21 bp, synthetic construct
  misc_feature 1..21: note = Synthetic construct
  source 1..21: mol_type = other DNA
cggagtgtttacagcaactac

SEQ ID NO: 11158 - DNA, 24 bp, synthetic construct
  misc_feature 1..24: note = Synthetic construct
  source 1..24: mol_type = other DNA
agtggcagcattgccagcaactat

SEQ ID NO: 11159 - DNA, 18 bp, synthetic construct
  misc_feature 1..18: note = Synthetic construct
  source 1..18: mol_type = other DNA
cagagtcttagtgactgg

SEQ ID NO: 11160 - DNA, 18 bp, synthetic construct
  misc_feature 1..18: note = Synthetic construct
  source 1..18: mol_type = other DNA
cagagtattagtgtctgg

SEQ ID NO: 11161 - DNA, 18 bp, synthetic construct
  misc_feature 1..18: note = Synthetic construct
  source 1..18: mol_type = other DNA
gaattgggggataaattt

SEQ ID NO: 11162 - DNA, 18 bp, synthetic construct
  misc_feature 1..18: note = Synthetic construct
  source 1..18: mol_type = other DNA
gtgagtgttaacagcaac

SEQ ID NO: 11163 - DNA, 21 bp, synthetic construct
  misc_feature 1..21: note = Synthetic construct
  source 1..21: mol_type = other DNA
cacactgttaccgccgactac

SEQ ID NO: 11164 - DNA, 36 bp, synthetic construct
  misc_feature 1..36: note = Synthetic construct
  source 1..36: mol_type = other DNA
cagagagtctccgagggcgccaacaattacaaatac

SEQ ID NO: 11165 - DNA, 33 bp, synthetic construct
  misc_feature 1..33: note = Synthetic construct
  source 1..33: mol_type = other DNA
cacagcctcctccaccatgataggaaaaccttc

SEQ ID NO: 11166 - DNA, 18 bp, synthetic construct
  misc_feature 1..18: note = Synthetic construct
  source 1..18: mol_type = other DNA
cagggcattagcacctat

SEQ ID NO: 11167 - DNA, 21 bp, synthetic construct
  misc_feature 1..21: note = Synthetic construct
  source 1..21: mol_type = other DNA
cagagtattaacagcaactac

SEQ ID NO: 11168 - DNA, 18 bp, synthetic construct
  misc_feature 1..18: note = Synthetic construct
  source 1..18: mol_type = other DNA
cagagtgttggcggcaac

SEQ ID NO: 11169 - DNA, 24 bp, synthetic construct
  misc_feature 1..24: note = Synthetic construct
  source 1..24: mol_type = other DNA
aggtcccacttcgccataaatttt

SEQ ID NO: 11170 - DNA, 18 bp, synthetic construct
  misc_feature 1..18: note = Synthetic construct
  source 1..18: mol_type = other DNA
cagaccatcgctacttct

SEQ ID NO: 11171 - DNA, 27 bp, synthetic construct
  misc_feature 1..27: note = Synthetic construct
  source 1..27: mol_type = other DNA
tctgactcagtctctacttcttactac

SEQ ID NO: 11172 - DNA, 21 bp, synthetic construct
  misc_feature 1..21: note = Synthetic construct
  source 1..21: mol_type = other DNA
cagagtgttcgcagcacctac

SEQ ID NO: 11173 - DNA, 21 bp, synthetic construct
  misc_feature 1..21: note = Synthetic construct
  source 1..21: mol_type = other DNA
cagagtattagcagcagttat

SEQ ID NO: 11174 - DNA, 18 bp, synthetic construct
  misc_feature 1..18: note = Synthetic construct
  source 1..18: mol_type = other DNA
cagagtattagtgactgg

SEQ ID NO: 11175 - DNA, 21 bp, synthetic construct
  misc_feature 1..21: note = Synthetic construct
  source 1..21: mol_type = other DNA
cagagtgtttctaacgactac

SEQ ID NO: 11176 - DNA, 18 bp, synthetic construct
  misc_feature 1..18: note = Synthetic construct
  source 1..18: mol_type = other DNA
cagagcattggtagtaac

SEQ ID NO: 11177 - DNA, 18 bp, synthetic construct
  misc_feature 1..18: note = Synthetic construct
  source 1..18: mol_type = other DNA
cagagtgttggcatctac

SEQ ID NO: 11178 - DNA, 18 bp, synthetic construct
  misc_feature 1..18: note = Synthetic construct
  source 1..18: mol_type = other DNA
cagggcattagaaatgat

SEQ ID NO: 11179 - DNA, 24 bp, synthetic construct
  misc_feature 1..24: note = Synthetic construct
  source 1..24: mol_type = other DNA
agtggcagcataaccagcgcctat

SEQ ID NO: 11180 - DNA, 18 bp, synthetic construct
  misc_feature 1..18: note = Synthetic construct
  source 1..18: mol_type = other DNA
cagagtgtgagcagcagc

SEQ ID NO: 11181 - DNA, 18 bp, synthetic construct
  misc_feature 1..18: note = Synthetic construct
  source 1..18: mol_type = other DNA
aacattagaagtaagagt

SEQ ID NO: 11182 - DNA, 27 bp, synthetic construct
  misc_feature 1..27: note = Synthetic construct
  source 1..27: mol_type = other DNA
agcagtgatgttggtggttataattct

SEQ ID NO: 11183 - DNA, 36 bp, synthetic construct
  misc_feature 1..36: note = Synthetic construct
  source 1..36: mol_type = other DNA
cagagtgttttatccagctccaacaataaggactac

SEQ ID NO: 11184 - DNA, 18 bp, synthetic construct
  misc_feature 1..18: note = Synthetic construct
  source 1..18: mol_type = other DNA
cagaccgtaaccaggttt

SEQ ID NO: 11185 - DNA, 18 bp, synthetic construct
  misc_feature 1..18: note = Synthetic construct
  source 1..18: mol_type = other DNA
cggcctgttagcagcaac

SEQ ID NO: 11186 - DNA, 18 bp, synthetic construct
  misc_feature 1..18: note = Synthetic construct
  source 1..18: mol_type = other DNA
cagggcattggaaatgat

SEQ ID NO: 11187 - DNA, 33 bp, synthetic construct
  misc_feature 1..33: note = Synthetic construct
  source 1..33: mol_type = other DNA
cagagcctcctgcatagtcatggatacaactat

SEQ ID NO: 11188 - skipped

SEQ ID NO: 11189 - DNA, 18 bp, synthetic construct
  misc_feature 1..18: note = Synthetic construct
  source 1..18: mol_type = other DNA
cagagtgttagcagttcc

SEQ ID NO: 11190 - DNA, 18 bp, synthetic construct
  misc_feature 1..18: note = Synthetic construct
  source 1..18: mol_type = other DNA
cagggcattagcaattat

SEQ ID NO: 11191 - DNA, 18 bp, synthetic construct
  misc_feature 1..18: note = Synthetic construct
  source 1..18: mol_type = other DNA
cagaacatttacaattat

SEQ ID NO: 11192 - DNA, 18 bp, synthetic construct
  misc_feature 1..18: note = Synthetic construct
  source 1..18: mol_type = other DNA
agcctcagaaattattat

SEQ ID NO: 11193 - DNA, 15 bp, synthetic construct
  misc_feature 1..15: note = Synthetic construct
  source 1..15: mol_type = other DNA
cagagtgttaacaac

SEQ ID NO: 11194 - DNA, 24 bp, synthetic construct
  misc_feature 1..24: note = Synthetic construct
  source 1..24: mol_type = other DNA
agctccaacatcggatttaattct

SEQ ID NO: 11195 - DNA, 18 bp, synthetic construct
  misc_feature 1..18: note = Synthetic construct
  source 1..18: mol_type = other DNA
aacattggaagtaaaact

SEQ ID NO: 11196 - DNA, 24 bp, synthetic construct
  misc_feature 1..24: note = Synthetic construct
  source 1..24: mol_type = other DNA
agctcaaacatcggaagaaaccct

SEQ ID NO: 11197 - skipped

SEQ ID NO: 11198 - DNA, 18 bp, synthetic construct
  misc_feature 1..18: note = Synthetic construct
  source 1..18: mol_type = other DNA
cagagtattgatagctgg

SEQ ID NO: 11199 - DNA, 18 bp, synthetic construct
  misc_feature 1..18: note = Synthetic construct
  source 1..18: mol_type = other DNA
aacattggaagtagaagt

SEQ ID NO: 11200 - DNA, 18 bp, synthetic construct
  misc_feature 1..18: note = Synthetic construct
  source 1..18: mol_type = other DNA
aacattgggagtcaaagt

SEQ ID NO: 11201 - DNA, 21 bp, synthetic construct
  misc_feature 1..21: note = Synthetic construct
  source 1..21: mol_type = other DNA
agtgggcacagcagctacgcc

SEQ ID NO: 11202 - DNA, 18 bp, synthetic construct
  misc_feature 1..18: note = Synthetic construct
  source 1..18: mol_type = other DNA
cagaccattactaggtct

SEQ ID NO: 11203 - DNA, 18 bp, synthetic construct
  misc_feature 1..18: note = Synthetic construct
  source 1..18: mol_type = other DNA
gcattgccaaatcaacat

SEQ ID NO: 11204 - DNA, 18 bp, synthetic construct
  misc_feature 1..18: note = Synthetic construct
  source 1..18: mol_type = other DNA
cagggcattagaaatgac

SEQ ID NO: 11205 - DNA, 18 bp, synthetic construct
  misc_feature 1..18: note = Synthetic construct
  source 1..18: mol_type = other DNA
cagagtgttaggaattac

SEQ ID NO: 11206 - DNA, 18 bp, synthetic construct
  misc_feature 1..18: note = Synthetic construct
  source 1..18: mol_type = other DNA
cagagtgttaacaccgac

SEQ ID NO: 11207 - DNA, 18 bp, synthetic construct
  misc_feature 1..18: note = Synthetic construct
  source 1..18: mol_type = other DNA
agcctcagaagctattct

SEQ ID NO: 11208 - DNA, 24 bp, synthetic construct
  misc_feature 1..24: note = Synthetic construct
  source 1..24: mol_type = other DNA
agtggcagcattgccaacaactat

SEQ ID NO: 11209 - DNA, 18 bp, synthetic construct
  misc_feature 1..18: note = Synthetic construct
  source 1..18: mol_type = other DNA
agcctcgaaagctattat

SEQ ID NO: 11210 - DNA, 18 bp, synthetic construct
  misc_feature 1..18: note = Synthetic construct
  source 1..18: mol_type = other DNA
aaattgggggataaatat

SEQ ID NO: 11211 - DNA, 18 bp, synthetic construct
  misc_feature 1..18: note = Synthetic construct
  source 1..18: mol_type = other DNA
caaagtatcagtaactgg

SEQ ID NO: 11212 - DNA, 18 bp, synthetic construct
  misc_feature 1..18: note = Synthetic construct
  source 1..18: mol_type = other DNA
caaagtgttggcacctac

SEQ ID NO: 11213 - DNA, 18 bp, synthetic construct
  misc_feature 1..18: note = Synthetic construct
  source 1..18: mol_type = other DNA
cgggacattaggagttat

SEQ ID NO: 11214 - DNA, 18 bp, synthetic construct
  misc_feature 1..18: note = Synthetic construct
  source 1..18: mol_type = other DNA
cagagtgtcagcagcgac

SEQ ID NO: 11215 - DNA, 18 bp, synthetic construct
  misc_feature 1..18: note = Synthetic construct
  source 1..18: mol_type = other DNA
cagaatattggtaactgg

SEQ ID NO: 11216 - DNA, 18 bp, synthetic construct
  misc_feature 1..18: note = Synthetic construct
  source 1..18: mol_type = other DNA
cagagcattggaagctgg

SEQ ID NO: 11217 - DNA, 18 bp, synthetic construct
  misc_feature 1..18: note = Synthetic construct
  source 1..18: mol_type = other DNA
cagagtattggcacgtgg

SEQ ID NO: 11218 - DNA, 24 bp, synthetic construct
  misc_feature 1..24: note = Synthetic construct
  source 1..24: mol_type = other DNA
agctccaacgtcggaagtaatact

SEQ ID NO: 11219 - DNA, 18 bp, synthetic construct
  misc_feature 1..18: note = Synthetic construct
  source 1..18: mol_type = other DNA
cagagtgtttcccacaac

SEQ ID NO: 11220 - DNA, 18 bp, synthetic construct
  misc_feature 1..18: note = Synthetic construct
  source 1..18: mol_type = other DNA
cagagtgttggtatctgg

SEQ ID NO: 11221 - DNA, 36 bp, synthetic construct
  misc_feature 1..36: note = Synthetic construct
  source 1..36: mol_type = other DNA
cagagtgttttcttcagctccaacaataggaactac

SEQ ID NO: 11222 - DNA, 18 bp, synthetic construct
  misc_feature 1..18: note = Synthetic construct
  source 1..18: mol_type = other DNA
ttcggcagcagttcttat

SEQ ID NO: 11223 - DNA, 27 bp, synthetic construct
  misc_feature 1..27: note = Synthetic construct
  source 1..27: mol_type = other DNA
agcagtgacgtcggttattataactat

SEQ ID NO: 11224 - DNA, 18 bp, synthetic construct
  misc_feature 1..18: note = Synthetic construct
  source 1..18: mol_type = other DNA
cagagtgtcagcagcaac

SEQ ID NO: 11225 - DNA, 18 bp, synthetic construct
  misc_feature 1..18: note = Synthetic construct
  source 1..18: mol_type = other DNA
tacattgaaagtaaaagt

SEQ ID NO: 11226 - DNA, 18 bp, synthetic construct
  misc_feature 1..18: note = Synthetic construct
  source 1..18: mol_type = other DNA
cagaatgttgacagttat

SEQ ID NO: 11227 - DNA, 18 bp, synthetic construct
  misc_feature 1..18: note = Synthetic construct
  source 1..18: mol_type = other DNA
cagagtgttggcagcaat

SEQ ID NO: 11228 - DNA, 24 bp, synthetic construct
  misc_feature 1..24: note = Synthetic construct
  source 1..24: mol_type = other DNA
aactccaacattggatataattct

SEQ ID NO: 11229 - DNA, 27 bp, synthetic construct
  misc_feature 1..27: note = Synthetic construct
  source 1..27: mol_type = other DNA
aacagtgatgttgggaattataacctt

SEQ ID NO: 11230 - DNA, 24 bp, synthetic construct
  misc_feature 1..24: note = Synthetic construct
  source 1..24: mol_type = other DNA
aactccaacattggaaataattat

SEQ ID NO: 11231 - DNA, 18 bp, synthetic construct
  misc_feature 1..18: note = Synthetic construct
  source 1..18: mol_type = other DNA
aacatcgaaactaaacct

SEQ ID NO: 11232 - DNA, 18 bp, synthetic construct
  misc_feature 1..18: note = Synthetic construct
  source 1..18: mol_type = other DNA
cagagcattggcacctat

SEQ ID NO: 11233 - DNA, 21 bp, synthetic construct
  misc_feature 1..21: note = Synthetic construct
  source 1..21: mol_type = other DNA
cagcatgttcgcacgaccatg

SEQ ID NO: 11234 - DNA, 18 bp, synthetic construct
  misc_feature 1..18: note = Synthetic construct
  source 1..18: mol_type = other DNA
cggagtgttagtggctgg

SEQ ID NO: 11235 - DNA, 27 bp, synthetic construct
  misc_feature 1..27: note = Synthetic construct
  source 1..27: mol_type = other DNA
agcagtgacgttgatgattataagttt

SEQ ID NO: 11236 - DNA, 21 bp, synthetic construct
  misc_feature 1..21: note = Synthetic construct
  source 1..21: mol_type = other DNA
agtgggcacagtagctacatc

SEQ ID NO: 11237 - DNA, 36 bp, synthetic construct
  misc_feature 1..36: note = Synthetic construct
  source 1..36: mol_type = other DNA
cagagtgtcttatatggctccagcaataagaactac

SEQ ID NO: 11238 - DNA, 18 bp, synthetic construct
  misc_feature 1..18: note = Synthetic construct
  source 1..18: mol_type = other DNA
cagagtattagttcctgg

SEQ ID NO: 11239 - DNA, 18 bp, synthetic construct
  misc_feature 1..18: note = Synthetic construct
  source 1..18: mol_type = other DNA
caggacattagcaattat

SEQ ID NO: 11240 - DNA, 18 bp, synthetic construct
  misc_feature 1..18: note = Synthetic construct
  source 1..18: mol_type = other DNA
cagagtattagtgcctgg

SEQ ID NO: 11241 - DNA, 18 bp, synthetic construct
  misc_feature 1..18: note = Synthetic construct
  source 1..18: mol_type = other DNA
cagagtattagaagctac

SEQ ID NO: 11242 - DNA, 27 bp, synthetic construct
  misc_feature 1..27: note = Synthetic construct
  source 1..27: mol_type = other DNA
agttccaacatcggggcagcttatgat

SEQ ID NO: 11243 - DNA, 18 bp, synthetic construct
  misc_feature 1..18: note = Synthetic construct
  source 1..18: mol_type = other DNA
ctggacatcagcaacttt

SEQ ID NO: 11244 - DNA, 18 bp, synthetic construct
  misc_feature 1..18: note = Synthetic construct
  source 1..18: mol_type = other DNA
cacagtattagttcgtgg

SEQ ID NO: 11245 - DNA, 33 bp, synthetic construct
  misc_feature 1..33: note = Synthetic construct
  source 1..33: mol_type = other DNA
caaagtgtcgttcgcagtgatgggatcacctac

SEQ ID NO: 11246 - DNA, 21 bp, synthetic construct
  misc_feature 1..21: note = Synthetic construct
  source 1..21: mol_type = other DNA
cagagtgttggtagcgactac

SEQ ID NO: 11247 - DNA, 21 bp, synthetic construct
  misc_feature 1..21: note = Synthetic construct
  source 1..21: mol_type = other DNA
accggtgacattggaggtctt

SEQ ID NO: 11248 - DNA, 36 bp, synthetic construct
  misc_feature 1..36: note = Synthetic construct
  source 1..36: mol_type = other DNA
cacagtgtcttatctaatttgaataataaggattac

SEQ ID NO: 11249 - DNA, 18 bp, synthetic construct
  misc_feature 1..18: note = Synthetic construct
  source 1..18: mol_type = other DNA
cagagtattactagctgg

SEQ ID NO: 11250 - DNA, 18 bp, synthetic construct
  misc_feature 1..18: note = Synthetic construct
  source 1..18: mol_type = other DNA
cagagtgtcggttcctcc

SEQ ID NO: 11251 - DNA, 18 bp, synthetic construct
  misc_feature 1..18: note = Synthetic construct
  source 1..18: mol_type = other DNA
cggagtatcagcaccaac

SEQ ID NO: 11252 - DNA, 18 bp, synthetic construct
  misc_feature 1..18: note = Synthetic construct
  source 1..18: mol_type = other DNA
cagggcattagcaattct

SEQ ID NO: 11253 - DNA, 18 bp, synthetic construct
  misc_feature 1..18: note = Synthetic construct
  source 1..18: mol_type = other DNA
gcattgccaaagaaattt

SEQ ID NO: 11254 - DNA, 18 bp, synthetic construct
  misc_feature 1..18: note = Synthetic construct
  source 1..18: mol_type = other DNA
caggacattaagaactat

SEQ ID NO: 11255 - DNA, 21 bp, synthetic construct
  misc_feature 1..21: note = Synthetic construct
  source 1..21: mol_type = other DNA
cagagtgtaaatggcaactac

SEQ ID NO: 11256 - DNA, 18 bp, synthetic construct
  misc_feature 1..18: note = Synthetic construct
  source 1..18: mol_type = other DNA
cagagcattggtattagc

SEQ ID NO: 11257 - DNA, 18 bp, synthetic construct
  misc_feature 1..18: note = Synthetic construct
  source 1..18: mol_type = other DNA
cagggtattagcagctgg

SEQ ID NO: 11258 - DNA, 18 bp, synthetic construct
  misc_feature 1..18: note = Synthetic construct
  source 1..18: mol_type = other DNA
cagaacattaacagcaat

SEQ ID NO: 11259 - DNA, 36 bp, synthetic construct
  misc_feature 1..36: note = Synthetic construct
  source 1..36: mol_type = other DNA
cagagtgttttatacaactccaacaataagaactac

SEQ ID NO: 11260 - DNA, 18 bp, synthetic construct
  misc_feature 1..18: note = Synthetic construct
  source 1..18: mol_type = other DNA
gtattgccaaagcaatat

SEQ ID NO: 11261 - DNA, 18 bp, synthetic construct
  misc_feature 1..18: note = Synthetic construct
  source 1..18: mol_type = other DNA
aatttgggggacaaatat

SEQ ID NO: 11262 - DNA, 18 bp, synthetic construct
  misc_feature 1..18: note = Synthetic construct
  source 1..18: mol_type = other DNA
agcctcagaagttatttt

SEQ ID NO: 11263 - DNA, 18 bp, synthetic construct
  misc_feature 1..18: note = Synthetic construct
  source 1..18: mol_type = other DNA
cacgacattgacaactat

SEQ ID NO: 11264 - DNA, 18 bp, synthetic construct
  misc_feature 1..18: note = Synthetic construct
  source 1..18: mol_type = other DNA
caggccattagccataat

SEQ ID NO: 11265 - DNA, 33 bp, synthetic construct
  misc_feature 1..33: note = Synthetic construct
  source 1..33: mol_type = other DNA
cagagcctcctgcatagtgatggatacacctat

SEQ ID NO: 11266 - DNA, 36 bp, synthetic construct
  misc_feature 1..36: note = Synthetic construct
  source 1..36: mol_type = other DNA
cagagtgttttatacagctccgacaataaaaactac

SEQ ID NO: 11267 - DNA, 23 bp, synthetic construct
  misc_feature 1..23: note = Synthetic construct
  source 1..23: mol_type = other DNA
agcagtgacgttggtggttataa

SEQ ID NO: 11268 - DNA, 27 bp, synthetic construct
  misc_feature 1..27: note = Synthetic construct
  source 1..27: mol_type = other DNA
agcagtgatgttgggacttatgacctt

SEQ ID NO: 11269 - DNA, 27 bp, synthetic construct
  misc_feature 1..27: note = Synthetic construct
  source 1..27: mol_type = other DNA
agcagtgacgttggtggttataattct

SEQ ID NO: 11270 - DNA, 21 bp, synthetic construct
  misc_feature 1..21: note = Synthetic construct
  source 1..21: mol_type = other DNA
cagagtgttcccagcagctat

SEQ ID NO: 11271 - DNA, 18 bp, synthetic construct
  misc_feature 1..18: note = Synthetic construct
  source 1..18: mol_type = other DNA
cagagaattagtagctgg

SEQ ID NO: 11272 - DNA, 18 bp, synthetic construct
  misc_feature 1..18: note = Synthetic construct
  source 1..18: mol_type = other DNA
cagagcattggtagttac

SEQ ID NO: 11273 - DNA, 21 bp, synthetic construct
  misc_feature 1..21: note = Synthetic construct
  source 1..21: mol_type = other DNA
cagagtgttagcagcaactcc

SEQ ID NO: 11274 - DNA, 36 bp, synthetic construct
  misc_feature 1..36: note = Synthetic construct
  source 1..36: mol_type = other DNA
cagagtgttttatacacttccaacaataagaactac

SEQ ID NO: 11275 - DNA, 27 bp, synthetic construct
  misc_feature 1..27: note = Synthetic construct
  source 1..27: mol_type = other DNA
tctggctcagtctctactagtgactac

SEQ ID NO: 11276 - DNA, 33 bp, synthetic construct
  misc_feature 1..33: note = Synthetic construct
  source 1..33: mol_type = other DNA
caaagcctcgtgtccagtaatgggaacacctac

SEQ ID NO: 11277 - DNA, 27 bp, synthetic construct
  misc_feature 1..27: note = Synthetic construct
  source 1..27: mol_type = other DNA
tctggctcagtctctactagttacttc

SEQ ID NO: 11278 - DNA, 18 bp, synthetic construct
  misc_feature 1..18: note = Synthetic construct
  source 1..18: mol_type = other DNA
gtactggcaaaaaaatat

SEQ ID NO: 11279 - DNA, 33 bp, synthetic construct
  misc_feature 1..33: note = Synthetic construct
  source 1..33: mol_type = other DNA
cagagcctcctgcatagtaatggatacaactat

SEQ ID NO: 11280 - DNA, 18 bp, synthetic construct
  misc_feature 1..18: note = Synthetic construct
  source 1..18: mol_type = other DNA
caggacattagcaactat

SEQ ID NO: 11281 - DNA, 18 bp, synthetic construct
  misc_feature 1..18: note = Synthetic construct
  source 1..18: mol_type = other DNA
cagagcattagtacctat

SEQ ID NO: 11282 - DNA, 18 bp, synthetic construct
  misc_feature 1..18: note = Synthetic construct
  source 1..18: mol_type = other DNA
cagagcgttaacaactat

SEQ ID NO: 11283 - DNA, 33 bp, synthetic construct
  misc_feature 1..33: note = Synthetic construct
  source 1..33: mol_type = other DNA
caaagcctcgttcacactgatggctacacctac

SEQ ID NO: 11284 - DNA, 18 bp, synthetic construct
  misc_feature 1..18: note = Synthetic construct
  source 1..18: mol_type = other DNA
gacattgaaactagaagt

SEQ ID NO: 11285 - DNA, 18 bp, synthetic construct
  misc_feature 1..18: note = Synthetic construct
  source 1..18: mol_type = other DNA
cagactattaatacttgg

SEQ ID NO: 11286 - DNA, 18 bp, synthetic construct
  misc_feature 1..18: note = Synthetic construct
  source 1..18: mol_type = other DNA
gagagtgttagcaaccac

SEQ ID NO: 11287 - DNA, 36 bp, synthetic construct
  misc_feature 1..36: note = Synthetic construct
  source 1..36: mol_type = other DNA
cagaatgttttatacagctccaacaataagaactac

SEQ ID NO: 11288 - DNA, 18 bp, synthetic construct
  misc_feature 1..18: note = Synthetic construct
  source 1..18: mol_type = other DNA
aacattggaaggaaaagt

SEQ ID NO: 11289 - DNA, 18 bp, synthetic construct
  misc_feature 1..18: note = Synthetic construct
  source 1..18: mol_type = other DNA
caaagcattagcggctat

SEQ ID NO: 11290 - DNA, 24 bp, synthetic construct
  misc_feature 1..24: note = Synthetic construct
  source 1..24: mol_type = other DNA
agtggcagcattgccagcagctat

SEQ ID NO: 11291 - DNA, 27 bp, synthetic construct
  misc_feature 1..27: note = Synthetic construct
  source 1..27: mol_type = other DNA
agtggcttcagtgttggggacttctgg

SEQ ID NO: 11292 - DNA, 24 bp, synthetic construct
  misc_feature 1..24: note = Synthetic construct
  source 1..24: mol_type = other DNA
aagtccaacatcggaagtaatact

SEQ ID NO: 11293 - DNA, 18 bp, synthetic construct
  misc_feature 1..18: note = Synthetic construct
  source 1..18: mol_type = other DNA
cagggtattggcagttat

SEQ ID NO: 11294 - DNA, 21 bp, synthetic construct
  misc_feature 1..21: note = Synthetic construct
  source 1..21: mol_type = other DNA
cagagtgttcgcagtagctac

SEQ ID NO: 11295 - DNA, 24 bp, synthetic construct
  misc_feature 1..24: note = Synthetic construct
  source 1..24: mol_type = other DNA
agctccaacattgggaataattat

SEQ ID NO: 11296 - DNA, 18 bp, synthetic construct
  misc_feature 1..18: note = Synthetic construct
  source 1..18: mol_type = other DNA
cgtggtattaacgatttg

SEQ ID NO: 11297 - DNA, 30 bp, synthetic construct
  misc_feature 1..30: note = Synthetic construct
  source 1..30: mol_type = other DNA
cagagtgtctcatataacagtaagaattac

SEQ ID NO: 11298 - DNA, 18 bp, synthetic construct
  misc_feature 1..18: note = Synthetic construct
  source 1..18: mol_type = other DNA
aacattggaactaagagt

SEQ ID NO: 11299 - DNA, 27 bp, synthetic construct
  misc_feature 1..27: note = Synthetic construct
  source 1..27: mol_type = other DNA
agcagtgatgttggtgcttatgactct

SEQ ID NO: 11300 - DNA, 18 bp, synthetic construct
  misc_feature 1..18: note = Synthetic construct
  source 1..18: mol_type = other DNA
cagagtattgatagttgg

SEQ ID NO: 11301 - DNA, 18 bp, synthetic construct
  misc_feature 1..18: note = Synthetic construct
  source 1..18: mol_type = other DNA
cagagtattaataactgg

SEQ ID NO: 11302 - DNA, 33 bp, synthetic construct
  misc_feature 1..33: note = Synthetic construct
  source 1..33: mol_type = other DNA
caaagtctcgtgtacagcgatggaaacacctac

SEQ ID NO: 11303 - DNA, 18 bp, synthetic construct
  misc_feature 1..18: note = Synthetic construct
  source 1..18: mol_type = other DNA
cagagtattagtaactgg

SEQ ID NO: 11304 - DNA, 18 bp, synthetic construct
  misc_feature 1..18: note = Synthetic construct
  source 1..18: mol_type = other DNA
caggacattggggatgat

SEQ ID NO: 11305 - DNA, 18 bp, synthetic construct
  misc_feature 1..18: note = Synthetic construct
  source 1..18: mol_type = other DNA
gtgttgtcaaagcaatat

SEQ ID NO: 11306 - DNA, 27 bp, synthetic construct
  misc_feature 1..27: note = Synthetic construct
  source 1..27: mol_type = other DNA
agttccaatctcgggccaggttatgat

SEQ ID NO: 11307 - DNA, 18 bp, synthetic construct
  misc_feature 1..18: note = Synthetic construct
  source 1..18: mol_type = other DNA
cagagtgttagctactac

SEQ ID NO: 11308 - DNA, 18 bp, synthetic construct
  misc_feature 1..18: note = Synthetic construct
  source 1..18: mol_type = other DNA
cagatcattaacagctat

SEQ ID NO: 11309 - DNA, 18 bp, synthetic construct
  misc_feature 1..18: note = Synthetic construct
  source 1..18: mol_type = other DNA
cacagtgttagcagctac

SEQ ID NO: 11310 - DNA, 27 bp, synthetic construct
  misc_feature 1..27: note = Synthetic construct
  source 1..27: mol_type = other DNA
agcagtgacgttggtggttataacttt

SEQ ID NO: 11311 - DNA, 18 bp, synthetic construct
  misc_feature 1..18: note = Synthetic construct
  source 1..18: mol_type = other DNA
cagggcattagaagttat

SEQ ID NO: 11312 - DNA, 18 bp, synthetic construct
  misc_feature 1..18: note = Synthetic construct
  source 1..18: mol_type = other DNA
cagagtattagcaacatc

SEQ ID NO: 11313 - DNA, 27 bp, synthetic construct
  misc_feature 1..27: note = Synthetic construct
  source 1..27: mol_type = other DNA
agcagtgacgttggtgattatgacttt

SEQ ID NO: 11314 - DNA, 24 bp, synthetic construct
  misc_feature 1..24: note = Synthetic construct
  source 1..24: mol_type = other DNA
agctccaacattggtaataattat

SEQ ID NO: 11315 - DNA, 18 bp, synthetic construct
  misc_feature 1..18: note = Synthetic construct
  source 1..18: mol_type = other DNA
cagggtattagcagttgg

SEQ ID NO: 11316 - DNA, 18 bp, synthetic construct
  misc_feature 1..18: note = Synthetic construct
  source 1..18: mol_type = other DNA
aatgttggaagaaaaagt

SEQ ID NO: 11317 - DNA, 18 bp, synthetic construct
  misc_feature 1..18: note = Synthetic construct
  source 1..18: mol_type = other DNA
cagggcattaactcttat

SEQ ID NO: 11318 - DNA, 18 bp, synthetic construct
  misc_feature 1..18: note = Synthetic construct
  source 1..18: mol_type = other DNA
cagagtgttaggggcagc

SEQ ID NO: 11319 - DNA, 18 bp, synthetic construct
  misc_feature 1..18: note = Synthetic construct
  source 1..18: mol_type = other DNA
cagggtattagtaattat

SEQ ID NO: 11320 - DNA, 24 bp, synthetic construct
  misc_feature 1..24: note = Synthetic construct
  source 1..24: mol_type = other DNA
ggctccaacattgggaataattat

SEQ ID NO: 11321 - DNA, 18 bp, synthetic construct
  misc_feature 1..18: note = Synthetic construct
  source 1..18: mol_type = other DNA
caaggagttagtagttat

SEQ ID NO: 11322 - DNA, 18 bp, synthetic construct
  misc_feature 1..18: note = Synthetic construct
  source 1..18: mol_type = other DNA
aaactgggggataaattt

SEQ ID NO: 11323 - DNA, 18 bp, synthetic construct
  misc_feature 1..18: note = Synthetic construct
  source 1..18: mol_type = other DNA
cagagcattagcacctat

SEQ ID NO: 11324 - DNA, 27 bp, synthetic construct
  misc_feature 1..27: note = Synthetic construct
  source 1..27: mol_type = other DNA
agcagtgatgttgggacctatgacttt

SEQ ID NO: 11325 - DNA, 18 bp, synthetic construct
  misc_feature 1..18: note = Synthetic construct
  source 1..18: mol_type = other DNA
cagagtattagcagctac

SEQ ID NO: 11326 - DNA, 36 bp, synthetic construct
  misc_feature 1..36: note = Synthetic construct
  source 1..36: mol_type = other DNA
cagagtgttttatacagctccaacaataagaactcc

SEQ ID NO: 11327 - DNA, 18 bp, synthetic construct
  misc_feature 1..18: note = Synthetic construct
  source 1..18: mol_type = other DNA
aaattgggggctagattt

SEQ ID NO: 11328 - DNA, 33 bp, synthetic construct
  misc_feature 1..33: note = Synthetic construct
  source 1..33: mol_type = other DNA
caaaacctcgtacacagtgatggaagcacctac

SEQ ID NO: 11329 - DNA, 36 bp, synthetic construct
  misc_feature 1..36: note = Synthetic construct
  source 1..36: mol_type = other DNA
cagagtcttttatacacctccaacaataagaactac

SEQ ID NO: 11330 - DNA, 21 bp, synthetic construct
  misc_feature 1..21: note = Synthetic construct
  source 1..21: mol_type = other DNA
cagagtgtcagcagtgggttc

SEQ ID NO: 11331 - DNA, 27 bp, synthetic construct
  misc_feature 1..27: note = Synthetic construct
  source 1..27: mol_type = other DNA
tctggctcagtctctacctattattat

SEQ ID NO: 11332 - DNA, 18 bp, synthetic construct
  misc_feature 1..18: note = Synthetic construct
  source 1..18: mol_type = other DNA
cagagtattaggagttgg

SEQ ID NO: 11333 - DNA, 27 bp, synthetic construct
  misc_feature 1..27: note = Synthetic construct
  source 1..27: mol_type = other DNA
actggagctgtcactagtggtcattat

SEQ ID NO: 11334 - DNA, 36 bp, synthetic construct
  misc_feature 1..36: note = Synthetic construct
  source 1..36: mol_type = other DNA
cagagtgttttattcagtttaaataataagaattac

SEQ ID NO: 11335 - DNA, 18 bp, synthetic construct
  misc_feature 1..18: note = Synthetic construct
  source 1..18: mol_type = other DNA
caggatattagcagctgg

SEQ ID NO: 11336 - DNA, 36 bp, synthetic construct
  misc_feature 1..36: note = Synthetic construct
  source 1..36: mol_type = other DNA
cagagtgttttattcagctccaacaataagaactac

SEQ ID NO: 11337 - DNA, 27 bp, synthetic construct
  misc_feature 1..27: note = Synthetic construct
  source 1..27: mol_type = other DNA
agcagtgacgttggtaattataattat

SEQ ID NO: 11338 - DNA, 18 bp, synthetic construct
  misc_feature 1..18: note = Synthetic construct
  source 1..18: mol_type = other DNA
cagagaatagccaacaac

SEQ ID NO: 11339 - DNA, 27 bp, synthetic construct
  misc_feature 1..27: note = Synthetic construct
  source 1..27: mol_type = other DNA
aacagtgacgttggtggttatgagtat

SEQ ID NO: 11340 - DNA, 24 bp, synthetic construct
  misc_feature 1..24: note = Synthetic construct
  source 1..24: mol_type = other DNA
agctccaacatcggaagtaatact

SEQ ID NO: 11341 - DNA, 27 bp, synthetic construct
  misc_feature 1..27: note = Synthetic construct
  source 1..27: mol_type = other DNA
agcagtgacgttggtgattatgactat

SEQ ID NO: 11342 - DNA, 21 bp, synthetic construct
  misc_feature 1..21: note = Synthetic construct
  source 1..21: mol_type = other DNA
cagagtgttagtaacaattac

SEQ ID NO: 11343 - DNA, 18 bp, synthetic construct
  misc_feature 1..18: note = Synthetic construct
  source 1..18: mol_type = other DNA
cagggcattagcgattat

SEQ ID NO: 11344 - DNA, 18 bp, synthetic construct
  misc_feature 1..18: note = Synthetic construct
  source 1..18: mol_type = other DNA
aacattggaagtcggagt

SEQ ID NO: 11345 - DNA, 18 bp, synthetic construct
  misc_feature 1..18: note = Synthetic construct
  source 1..18: mol_type = other DNA
cagagtgttagtaccaac

SEQ ID NO: 11346 - DNA, 18 bp, synthetic construct
  misc_feature 1..18: note = Synthetic construct
  source 1..18: mol_type = other DNA
cagagtgttaggagccac

SEQ ID NO: 11347 - DNA, 27 bp, synthetic construct
  misc_feature 1..27: note = Synthetic construct
  source 1..27: mol_type = other DNA
agcagtgatgtggggacttattccctt

SEQ ID NO: 11348 - DNA, 36 bp, synthetic construct
  misc_feature 1..36: note = Synthetic construct
  source 1..36: mol_type = other DNA
ctgagtgttttttataagtacaacaataacaactac

SEQ ID NO: 11349 - DNA, 18 bp, synthetic construct
  misc_feature 1..18: note = Synthetic construct
  source 1..18: mol_type = other DNA
aatgttgaagttaggagt

SEQ ID NO: 11350 - DNA, 18 bp, synthetic construct
  misc_feature 1..18: note = Synthetic construct
  source 1..18: mol_type = other DNA
cacagcattatgaccaac

SEQ ID NO: 11351 - DNA, 18 bp, synthetic construct
  misc_feature 1..18: note = Synthetic construct
  source 1..18: mol_type = other DNA
cagaatattgtcaatact

SEQ ID NO: 11352 - DNA, 18 bp, synthetic construct
  misc_feature 1..18: note = Synthetic construct
  source 1..18: mol_type = other DNA
cagagtgttaacagcgac

SEQ ID NO: 11353 - DNA, 18 bp, synthetic construct
  misc_feature 1..18: note = Synthetic construct
  source 1..18: mol_type = other DNA
cagagaatcagtagcaac

SEQ ID NO: 11354 - DNA, 18 bp, synthetic construct
  misc_feature 1..18: note = Synthetic construct
  source 1..18: mol_type = other DNA
cagagcattaacagttat

SEQ ID NO: 11355 - DNA, 24 bp, synthetic construct
  misc_feature 1..24: note = Synthetic construct
  source 1..24: mol_type = other DNA
agctccaacattgggaatcattat

SEQ ID NO: 11356 - DNA, 18 bp, synthetic construct
  misc_feature 1..18: note = Synthetic construct
  source 1..18: mol_type = other DNA
caatacattggcagtttt

SEQ ID NO: 11357 - DNA, 18 bp, synthetic construct
  misc_feature 1..18: note = Synthetic construct
  source 1..18: mol_type = other DNA
caggctattgacaatttt

SEQ ID NO: 11358 - DNA, 36 bp, synthetic construct
  misc_feature 1..36: note = Synthetic construct
  source 1..36: mol_type = other DNA
caaagtgttttgttcgcgtccaacggtcggaatttc

SEQ ID NO: 11359 - DNA, 18 bp, synthetic construct
  misc_feature 1..18: note = Synthetic construct
  source 1..18: mol_type = other DNA
gagagtattagtgactgg

SEQ ID NO: 11360 - DNA, 18 bp, synthetic construct
  misc_feature 1..18: note = Synthetic construct
  source 1..18: mol_type = other DNA
aaattggaggatgaatat

SEQ ID NO: 11361 - DNA, 18 bp, synthetic construct
  misc_feature 1..18: note = Synthetic construct
  source 1..18: mol_type = other DNA
gagagtgttagtagttac

SEQ ID NO: 11362 - DNA, 18 bp, synthetic construct
  misc_feature 1..18: note = Synthetic construct
  source 1..18: mol_type = other DNA
cagagtattagcgcctcc

SEQ ID NO: 11363 - DNA, 33 bp, synthetic construct
  misc_feature 1..33: note = Synthetic construct
  source 1..33: mol_type = other DNA
cggagtctcgttcacagtgatggggccacgtac

SEQ ID NO: 11364 - DNA, 18 bp, synthetic construct
  misc_feature 1..18: note = Synthetic construct
  source 1..18: mol_type = other DNA
cagagcattagcaactat

SEQ ID NO: 11365 - DNA, 24 bp, synthetic construct
  misc_feature 1..24: note = Synthetic construct
  source 1..24: mol_type = other DNA
agctccaacatcggtaacaatcct

SEQ ID NO: 11366 - DNA, 24 bp, synthetic construct
  misc_feature 1..24: note = Synthetic construct
  source 1..24: mol_type = other DNA
agcaacaatgttggcaaccaagga

SEQ ID NO: 11367 - DNA, 18 bp, synthetic construct
  misc_feature 1..18: note = Synthetic construct
  source 1..18: mol_type = other DNA
cagagtatttataactgg

SEQ ID NO: 11368 - DNA, 27 bp, synthetic construct
  misc_feature 1..27: note = Synthetic construct
  source 1..27: mol_type = other DNA
agcagtgacattggtgcctatgactat

SEQ ID NO: 11369 - DNA, 18 bp, synthetic construct
  misc_feature 1..18: note = Synthetic construct
  source 1..18: mol_type = other DNA
cagagtgttggcagcagc

SEQ ID NO: 11370 - DNA, 30 bp, synthetic construct
  misc_feature 1..30: note = Synthetic construct
  source 1..30: mol_type = other DNA
aagagcctcctgcataatggagacaacctt

SEQ ID NO: 11371 - DNA, 18 bp, synthetic construct
  misc_feature 1..18: note = Synthetic construct
  source 1..18: mol_type = other DNA
cagggtattagcaactgg

SEQ ID NO: 11372 - DNA, 27 bp, synthetic construct
  misc_feature 1..27: note = Synthetic construct
  source 1..27: mol_type = other DNA
agcacttatgtcgatgcttttacctat

SEQ ID NO: 11373 - DNA, 18 bp, synthetic construct
  misc_feature 1..18: note = Synthetic construct
  source 1..18: mol_type = other DNA
cagggcattagaaataat

SEQ ID NO: 11374 - DNA, 18 bp, synthetic construct
  misc_feature 1..18: note = Synthetic construct
  source 1..18: mol_type = other DNA
caggatgttgattcttat

SEQ ID NO: 11375 - DNA, 36 bp, synthetic construct
  misc_feature 1..36: note = Synthetic construct
  source 1..36: mol_type = other DNA
cagtctcttttatacagctccagccataagaacttc

SEQ ID NO: 11376 - DNA, 27 bp, synthetic construct
  misc_feature 1..27: note = Synthetic construct
  source 1..27: mol_type = other DNA
agcagtgaccttagtgtctacaactct

SEQ ID NO: 11377 - DNA, 36 bp, synthetic construct
  misc_feature 1..36: note = Synthetic construct
  source 1..36: mol_type = other DNA
cagagtgttttatacacctccaataataagaactat

SEQ ID NO: 11378 - DNA, 18 bp, synthetic construct
  misc_feature 1..18: note = Synthetic construct
  source 1..18: mol_type = other DNA
cagggaattggtacttgg

SEQ ID NO: 11379 - DNA, 18 bp, synthetic construct
  misc_feature 1..18: note = Synthetic construct
  source 1..18: mol_type = other DNA
cagagcattaggacctat

SEQ ID NO: 11380 - DNA, 18 bp, synthetic construct
  misc_feature 1..18: note = Synthetic construct
  source 1..18: mol_type = other DNA
aacgttggaactcaaaat

SEQ ID NO: 11381 - DNA, 24 bp, synthetic construct
  misc_feature 1..24: note = Synthetic construct
  source 1..24: mol_type = other DNA
agctccaacattggcaataactat

SEQ ID NO: 11382 - DNA, 21 bp, synthetic construct
  misc_feature 1..21: note = Synthetic construct
  source 1..21: mol_type = other DNA
cagctttttagcggcagctat

SEQ ID NO: 11383 - DNA, 21 bp, synthetic construct
  misc_feature 1..21: note = Synthetic construct
  source 1..21: mol_type = other DNA
cagagtgtcactaacgactat

SEQ ID NO: 11384 - DNA, 33 bp, synthetic construct; identical to SEQ ID NO: 1865
  misc_feature 1..33: note = Synthetic construct
  source 1..33: mol_type = other DNA

SEQ ID NO: 11385 - DNA, 27 bp, synthetic construct
  misc_feature 1..27: note = Synthetic construct
  source 1..27: mol_type = other DNA
aacagtgacgttggtggttataagtat

SEQ ID NO: 11386 - DNA, 21 bp, synthetic construct
  misc_feature 1..21: note = Synthetic construct
  source 1..21: mol_type = other DNA
cagactattaactacaactat

SEQ ID NO: 11387 - DNA, 18 bp, synthetic construct
  misc_feature 1..18: note = Synthetic construct
  source 1..18: mol_type = other DNA
cagtccattggcaatttt

SEQ ID NO: 11388 - DNA, 18 bp, synthetic construct
  misc_feature 1..18: note = Synthetic construct
  source 1..18: mol_type = other DNA
cagacctttaacggcttt

SEQ ID NO: 11389 - DNA, 18 bp, synthetic construct
  misc_feature 1..18: note = Synthetic construct
  source 1..18: mol_type = other DNA
aaacttggccgcagaagt

SEQ ID NO: 11390 - DNA, 24 bp, synthetic construct
  misc_feature 1..24: note = Synthetic construct
  source 1..24: mol_type = other DNA
acctccaacattgggaataattat

SEQ ID NO: 11391 - DNA, 24 bp, synthetic construct
  misc_feature 1..24: note = Synthetic construct
  source 1..24: mol_type = other DNA
agctccaatattgggaataattat

SEQ ID NO: 11392 - DNA, 36 bp, synthetic construct
  misc_feature 1..36: note = Synthetic construct
  source 1..36: mol_type = other DNA
cagaatcttttatccagcttcaacagtgaaaactac

SEQ ID NO: 11393 - DNA, 18 bp, synthetic construct
  misc_feature 1..18: note = Synthetic construct
  source 1..18: mol_type = other DNA
caagacataggtaacttt

SEQ ID NO: 11394 - DNA, 27 bp, synthetic construct
  misc_feature 1..27: note = Synthetic construct
  source 1..27: mol_type = other DNA
agtagtgacagtagtgtttataactct

SEQ ID NO: 11395 - DNA, 21 bp, synthetic construct
  misc_feature 1..21: note = Synthetic construct
  source 1..21: mol_type = other DNA
cagagtgtaagcggcaaccac

SEQ ID NO: 11396 - DNA, 21 bp, synthetic construct
  misc_feature 1..21: note = Synthetic construct
  source 1..21: mol_type = other DNA
cagagtattagcgatttctac

SEQ ID NO: 11397 - DNA, 36 bp, synthetic construct
  misc_feature 1..36: note = Synthetic construct
  source 1..36: mol_type = other DNA
gaaagtcttttatacagttcaaccaatcgtgactac

SEQ ID NO: 11398 - DNA, 18 bp, synthetic construct
  misc_feature 1..18: note = Synthetic construct
  source 1..18: mol_type = other DNA
cagaccattaataactat

SEQ ID NO: 11399 - DNA, 18 bp, synthetic construct
  misc_feature 1..18: note = Synthetic construct
  source 1..18: mol_type = other DNA
cagggcattagcgattac

SEQ ID NO: 11400 - DNA, 24 bp, synthetic construct
  misc_feature 1..24: note = Synthetic construct
  source 1..24: mol_type = other DNA
agctccaacattgggatttatcct

SEQ ID NO: 11401 - DNA, 27 bp, synthetic construct
  misc_feature 1..27: note = Synthetic construct
  source 1..27: mol_type = other DNA
ggcagtgacgttggtggttatgactat

SEQ ID NO: 11402 - DNA, 18 bp, synthetic construct
  misc_feature 1..18: note = Synthetic construct
  source 1..18: mol_type = other DNA
cagggccttagtggtgaa

SEQ ID NO: 11403 - DNA, 24 bp, synthetic construct
  misc_feature 1..24: note = Synthetic construct
  source 1..24: mol_type = other DNA
agctccaacatcggacgaaattat

SEQ ID NO: 11404 - DNA, 33 bp, synthetic construct
  misc_feature 1..33: note = Synthetic construct
  source 1..33: mol_type = other DNA
cagagcctcctccatagtaatggaaagacctat

SEQ ID NO: 11405 - DNA, 24 bp, synthetic construct
  misc_feature 1..24: note = Synthetic construct
  source 1..24: mol_type = other DNA
agctccaacattgggcataattat

SEQ ID NO: 11406 - DNA, 21 bp, synthetic construct
  misc_feature 1..21: note = Synthetic construct
  source 1..21: mol_type = other DNA
cagagtgttagcagcgaccac

SEQ ID NO: 11407 - DNA, 18 bp, synthetic construct
  misc_feature 1..18: note = Synthetic construct
  source 1..18: mol_type = other DNA
caagacattgatgatgat

SEQ ID NO: 11408 - DNA, 27 bp, synthetic construct
  misc_feature 1..27: note = Synthetic construct
  source 1..27: mol_type = other DNA
agctccaacatcggggcaaattatgat

SEQ ID NO: 11409 - DNA, 18 bp, synthetic construct
  misc_feature 1..18: note = Synthetic construct
  source 1..18: mol_type = other DNA
caggtcattaccaattct

SEQ ID NO: 11410 - DNA, 18 bp, synthetic construct
  misc_feature 1..18: note = Synthetic construct
  source 1..18: mol_type = other DNA
cagagcattagaaatgat

SEQ ID NO: 11411 - DNA, 18 bp, synthetic construct
  misc_feature 1..18: note = Synthetic construct
  source 1..18: mol_type = other DNA
acattgtcaaagcaatat

SEQ ID NO: 11412 - DNA, 18 bp, synthetic construct
  misc_feature 1..18: note = Synthetic construct
  source 1..18: mol_type = other DNA
caggaaatagaacatcat

SEQ ID NO: 11413 - DNA, 18 bp, synthetic construct
  misc_feature 1..18: note = Synthetic construct
  source 1..18: mol_type = other DNA
cagggtattagcagcttt

SEQ ID NO: 11414 - DNA, 36 bp, synthetic construct
  misc_feature 1..36: note = Synthetic construct
  source 1..36: mol_type = other DNA
cagagtattttaaacagtgccagcaataaggaccac

SEQ ID NO: 11415 - DNA, 18 bp, synthetic construct
  misc_feature 1..18: note = Synthetic construct
  source 1..18: mol_type = other DNA
aacattgtgagtaaaagt

SEQ ID NO: 11416 - DNA, 27 bp, synthetic construct
  misc_feature 1..27: note = Synthetic construct
  source 1..27: mol_type = other DNA
agcagtgacgttggtgcttatagtttt

SEQ ID NO: 11417 - DNA, 18 bp, synthetic construct
  misc_feature 1..18: note = Synthetic construct
  source 1..18: mol_type = other DNA
cagagtgtaagcagcaat

SEQ ID NO: 11418 - DNA, 18 bp, synthetic construct
  misc_feature 1..18: note = Synthetic construct
  source 1..18: mol_type = other DNA
cagagcattagcttctat

SEQ ID NO: 11419 - DNA, 18 bp, synthetic construct
  misc_feature 1..18: note = Synthetic construct
  source 1..18: mol_type = other DNA
cagggtgttggcagctac

SEQ ID NO: 11420 - DNA, 27 bp, synthetic construct
  misc_feature 1..27: note = Synthetic construct
  source 1..27: mol_type = other DNA
agttccaacatcgggggcaatcatgat

SEQ ID NO: 11421 - DNA, 27 bp, synthetic construct
  misc_feature 1..27: note = Synthetic construct
  source 1..27: mol_type = other DNA
agcactgacgttggtggttataactat

SEQ ID NO: 11422 - DNA, 18 bp, synthetic construct
  misc_feature 1..18: note = Synthetic construct
  source 1..18: mol_type = other DNA
agcctccgagaacatgct

SEQ ID NO: 11423 - DNA, 18 bp, synthetic construct
  misc_feature 1..18: note = Synthetic construct
  source 1..18: mol_type = other DNA
cacagtattagcagctac

SEQ ID NO: 11424 - DNA, 33 bp, synthetic construct
  misc_feature 1..33: note = Synthetic construct
  source 1..33: mol_type = other DNA
caaggcctcgtacacagtgatggaaacacctac

SEQ ID NO: 11425 - DNA, 18 bp, synthetic construct
  misc_feature 1..18: note = Synthetic construct
  source 1..18: mol_type = other DNA
cagagcattggtaatagc

SEQ ID NO: 11426 - DNA, 21 bp, synthetic construct
  misc_feature 1..21: note = Synthetic construct
  source 1..21: mol_type = other DNA
cagagtgttaacagtaactac

SEQ ID NO: 11427 - DNA, 18 bp, synthetic construct
  misc_feature 1..18: note = Synthetic construct
  source 1..18: mol_type = other DNA
cagtccattaactactat

SEQ ID NO: 11428 - DNA, 21 bp, synthetic construct
  misc_feature 1..21: note = Synthetic construct
  source 1..21: mol_type = other DNA
cagactgttagcaacacctcc

SEQ ID NO: 11429 - DNA, 18 bp, synthetic construct
  misc_feature 1..18: note = Synthetic construct
  source 1..18: mol_type = other DNA
caggccataagcaattcc

SEQ ID NO: 11430 - DNA, 27 bp, synthetic construct
  misc_feature 1..27: note = Synthetic construct
  source 1..27: mol_type = other DNA
agcagtgacgttggtgattataactat

SEQ ID NO: 11431 - DNA, 27 bp, synthetic construct
  misc_feature 1..27: note = Synthetic construct
  source 1..27: mol_type = other DNA
agtgacatcaatgttggtagccacaac

SEQ ID NO: 11432 - DNA, 18 bp, synthetic construct
  misc_feature 1..18: note = Synthetic construct
  source 1..18: mol_type = other DNA
caggacattaccaaatat

SEQ ID NO: 11433 - DNA, 18 bp, synthetic construct
  misc_feature 1..18: note = Synthetic construct
  source 1..18: mol_type = other DNA
cagggtgctcacaaatgg

SEQ ID NO: 11434 - DNA, 18 bp, synthetic construct
  misc_feature 1..18: note = Synthetic construct
  source 1..18: mol_type = other DNA
cagagtgtcagaaactcc

SEQ ID NO: 11435 - DNA, 24 bp, synthetic construct
  misc_feature 1..24: note = Synthetic construct
  source 1..24: mol_type = other DNA
atctccaacattgggagaaattat

SEQ ID NO: 11436 - DNA, 18 bp, synthetic construct
  misc_feature 1..18: note = Synthetic construct
  source 1..18: mol_type = other DNA
tttggtggttataactat

SEQ ID NO: 11437 - DNA, 36 bp, synthetic construct
  misc_feature 1..36: note = Synthetic construct
  source 1..36: mol_type = other DNA
cagagtgttttatacagctcctacaataagagctac

SEQ ID NO: 11438 - DNA, 24 bp, synthetic construct
  misc_feature 1..24: note = Synthetic construct
  source 1..24: mol_type = other DNA
agctccaacctcggaagtaacact

SEQ ID NO: 11439 - DNA, 18 bp, synthetic construct
  misc_feature 1..18: note = Synthetic construct
  source 1..18: mol_type = other DNA
cagaacattggcaggtat

SEQ ID NO: 11440 - DNA, 18 bp, synthetic construct
  misc_feature 1..18: note = Synthetic construct
  source 1..18: mol_type = other DNA
aacattatatctaaaagt

SEQ ID NO: 11441 - DNA, 24 bp, synthetic construct
  misc_feature 1..24: note = Synthetic construct
  source 1..24: mol_type = other DNA
atctccaacattgggactaattat

SEQ ID NO: 11442 - DNA, 18 bp, synthetic construct
  misc_feature 1..18: note = Synthetic construct
  source 1..18: mol_type = other DNA
cagggcaatggctactct

SEQ ID NO: 11443 - DNA, 21 bp, synthetic construct
  misc_feature 1..21: note = Synthetic construct
  source 1..21: mol_type = other DNA
cagagtgttagcaacaactac

SEQ ID NO: 11444 - DNA, 33 bp, synthetic construct
  misc_feature 1..33: note = Synthetic construct
  source 1..33: mol_type = other DNA
cagagtctccgccatagtaaaggaatcactttt

SEQ ID NO: 11445 - DNA, 18 bp, synthetic construct
  misc_feature 1..18: note = Synthetic construct
  source 1..18: mol_type = other DNA
caaaacataaccaaccat

SEQ ID NO: 11446 - DNA, 27 bp, synthetic construct
  misc_feature 1..27: note = Synthetic construct
  source 1..27: mol_type = other DNA
agcagtgacgttggtacttataactat

SEQ ID NO: 11447 - DNA, 33 bp, synthetic construct
  misc_feature 1..33: note = Synthetic construct
  source 1..33: mol_type = other DNA
cagagcctcctgcatactaatggatacaactat

SEQ ID NO: 11448 - DNA, 18 bp, synthetic construct
  misc_feature 1..18: note = Synthetic construct
  source 1..18: mol_type = other DNA
catgacattggcaaccat

SEQ ID NO: 11449 - DNA, 27 bp, synthetic construct
  misc_feature 1..27: note = Synthetic construct
  source 1..27: mol_type = other DNA
aacactgatgttgggagttataacctt

SEQ ID NO: 11450 - DNA, 18 bp, synthetic construct
  misc_feature 1..18: note = Synthetic construct
  source 1..18: mol_type = other DNA
cagagtattgccacttat

SEQ ID NO: 11451 - DNA, 36 bp, synthetic construct
  misc_feature 1..36: note = Synthetic construct
  source 1..36: mol_type = other DNA
cagactattttattcaactccaacaataagaactac

SEQ ID NO: 11452 - DNA, 18 bp, synthetic construct
  misc_feature 1..18: note = Synthetic construct
  source 1..18: mol_type = other DNA
cagagtgttagcagttac

SEQ ID NO: 11453 - DNA, 18 bp, synthetic construct
  misc_feature 1..18: note = Synthetic construct
  source 1..18: mol_type = other DNA
cttcatattagcacttat

SEQ ID NO: 11454 - DNA, 18 bp, synthetic construct
  misc_feature 1..18: note = Synthetic construct
  source 1..18: mol_type = other DNA
cagcccatcagtcagtat

SEQ ID NO: 11455 - DNA, 21 bp, synthetic construct
  misc_feature 1..21: note = Synthetic construct
  source 1..21: mol_type = other DNA
agtgagcacgacacctatgcc

SEQ ID NO: 11456 - DNA, 27 bp, synthetic construct
  misc_feature 1..27: note = Synthetic construct
  source 1..27: mol_type = other DNA
agctccaacatcggggcagattatgat

SEQ ID NO: 11457 - DNA, 18 bp, synthetic construct
  misc_feature 1..18: note = Synthetic construct
  source 1..18: mol_type = other DNA
cagagtgttagcaccaac

SEQ ID NO: 11458 - DNA, 18 bp, synthetic construct
  misc_feature 1..18: note = Synthetic construct
  source 1..18: mol_type = other DNA
cagagtgttaacacttac

SEQ ID NO: 11459 - DNA, 18 bp, synthetic construct
  misc_feature 1..18: note = Synthetic construct
  source 1..18: mol_type = other DNA
cagggcattcgcagtgct

SEQ ID NO: 11460 - DNA, 27 bp, synthetic construct
  misc_feature 1..27: note = Synthetic construct
  source 1..27: mol_type = other DNA
actggagcagtcaccagtggttactat

SEQ ID NO: 11461 - DNA, 18 bp, synthetic construct
  misc_feature 1..18: note = Synthetic construct
  source 1..18: mol_type = other DNA
cagacaattagtagctgg

SEQ ID NO: 11462 - DNA, 21 bp, synthetic construct
  misc_feature 1..21: note = Synthetic construct
  source 1..21: mol_type = other DNA
cagagtgttagaagcagctac

SEQ ID NO: 11463 - DNA, 18 bp, synthetic construct
  misc_feature 1..18: note = Synthetic construct
  source 1..18: mol_type = other DNA
agtctcagaggctattat

SEQ ID NO: 11464 - DNA, 18 bp, synthetic construct
  misc_feature 1..18: note = Synthetic construct
  source 1..18: mol_type = other DNA
cagaccattattaactat

SEQ ID NO: 11465 - DNA, 36 bp, synthetic construct
  misc_feature 1..36: note = Synthetic construct
  source 1..36: mol_type = other DNA
cagagcctcttggatagtgatgatggaagcacctat

SEQ ID NO: 11466 - DNA, 18 bp, synthetic construct
  misc_feature 1..18: note = Synthetic construct
  source 1..18: mol_type = other DNA
cagagcattagcagcttt

SEQ ID NO: 11467 - DNA, 18 bp, synthetic construct
  misc_feature 1..18: note = Synthetic construct
  source 1..18: mol_type = other DNA
cagaccattgcaaagtct

SEQ ID NO: 11468 - DNA, 18 bp, synthetic construct
  misc_feature 1..18: note = Synthetic construct
  source 1..18: mol_type = other DNA
cagagcatttacaactat

SEQ ID NO: 11469 - DNA, 27 bp, synthetic construct
  misc_feature 1..27: note = Synthetic construct
  source 1..27: mol_type = other DNA
agcaatgattttgggacttataacctt

SEQ ID NO: 11470 - DNA, 18 bp, synthetic construct
  misc_feature 1..18: note = Synthetic construct
  source 1..18: mol_type = other DNA
cagagtgttagcagctat

SEQ ID NO: 11471 - DNA, 18 bp, synthetic construct
  misc_feature 1..18: note = Synthetic construct
  source 1..18: mol_type = other DNA
gaattgggggaaaaattt

SEQ ID NO: 11472 - DNA, 36 bp, synthetic construct
  misc_feature 1..36: note = Synthetic construct
  source 1..36: mol_type = other DNA
cagagtcttttatacagctccgacaatatgaactac

SEQ ID NO: 11473 - DNA, 24 bp, synthetic construct
  misc_feature 1..24: note = Synthetic construct
  source 1..24: mol_type = other DNA
agctccaacatcggagataatcct

SEQ ID NO: 11474 - DNA, 24 bp, synthetic construct
  misc_feature 1..24: note = Synthetic construct
  source 1..24: mol_type = other DNA
acctccaatattggcaatcatttt

SEQ ID NO: 11475 - DNA, 18 bp, synthetic construct
  misc_feature 1..18: note = Synthetic construct
  source 1..18: mol_type = other DNA
cagggcattaatagttat

SEQ ID NO: 11476 - DNA, 18 bp, synthetic construct
  misc_feature 1..18: note = Synthetic construct
  source 1..18: mol_type = other DNA
cagagcattagcggctat

SEQ ID NO: 11477 - DNA, 27 bp, synthetic construct
  misc_feature 1..27: note = Synthetic construct
  source 1..27: mol_type = other DNA
agctccaacatcggggcaggttttgat

SEQ ID NO: 11478 - DNA, 21 bp, synthetic construct
  misc_feature 1..21: note = Synthetic construct
  source 1..21: mol_type = other DNA
caaagtgttagcagcaactac

SEQ ID NO: 11479 - DNA, 18 bp, synthetic construct
  misc_feature 1..18: note = Synthetic construct
  source 1..18: mol_type = other DNA
cagagtattaatactagg

SEQ ID NO: 11480 - DNA, 18 bp, synthetic construct
  misc_feature 1..18: note = Synthetic construct
  source 1..18: mol_type = other DNA
cagagcatatccacctat

SEQ ID NO: 11481 - DNA, 21 bp, synthetic construct
  misc_feature 1..21: note = Synthetic construct
  source 1..21: mol_type = other DNA
cagactattatcagcaactat

SEQ ID NO: 11482 - DNA, 27 bp, synthetic construct
  misc_feature 1..27: note = Synthetic construct
  source 1..27: mol_type = other DNA
agctccaatatcggggcgagttctggt

SEQ ID NO: 11483 - DNA, 18 bp, synthetic construct
  misc_feature 1..18: note = Synthetic construct
  source 1..18: mol_type = other DNA
cagaacataaccaaccat

SEQ ID NO: 11484 - DNA, 18 bp, synthetic construct
  misc_feature 1..18: note = Synthetic construct
  source 1..18: mol_type = other DNA
cagagtgtgagcagcaac

SEQ ID NO: 11485 - DNA, 33 bp, synthetic construct
  misc_feature 1..33: note = Synthetic construct
  source 1..33: mol_type = other DNA
cacgccctcgttcacagtgatggagacacttac

SEQ ID NO: 11486 - DNA, 18 bp, synthetic construct
  misc_feature 1..18: note = Synthetic construct
  source 1..18: mol_type = other DNA
cagagtgttgacagctac

SEQ ID NO: 11487 - DNA, 27 bp, synthetic construct
  misc_feature 1..27: note = Synthetic construct
  source 1..27: mol_type = other DNA
agcgatgacgttggtgcttttgactat

SEQ ID NO: 11488 - DNA, 18 bp, synthetic construct
  misc_feature 1..18: note = Synthetic construct
  source 1..18: mol_type = other DNA
aacattggatataaaagt

SEQ ID NO: 11489 - DNA, 36 bp, synthetic construct
  misc_feature 1..36: note = Synthetic construct
  source 1..36: mol_type = other DNA
cagagtgttttaaacacctccaacaataagaactac

SEQ ID NO: 11490 - DNA, 21 bp, synthetic construct
  misc_feature 1..21: note = Synthetic construct
  source 1..21: mol_type = other DNA
cagagtgtcgccggcggccac

SEQ ID NO: 11491 - DNA, 18 bp, synthetic construct
  misc_feature 1..18: note = Synthetic construct
  source 1..18: mol_type = other DNA
aacattggaggtatacgt

SEQ ID NO: 11492 - DNA, 18 bp, synthetic construct
  misc_feature 1..18: note = Synthetic construct
  source 1..18: mol_type = other DNA
cagggtattagtagttat

SEQ ID NO: 11493 - DNA, 18 bp, synthetic construct
  misc_feature 1..18: note = Synthetic construct
  source 1..18: mol_type = other DNA
cagagcattagtgacaat

SEQ ID NO: 11494 - DNA, 18 bp, synthetic construct
  misc_feature 1..18: note = Synthetic construct
  source 1..18: mol_type = other DNA
cagagaattgacaataaa

SEQ ID NO: 11495 - DNA, 27 bp, synthetic construct
  misc_feature 1..27: note = Synthetic construct
  source 1..27: mol_type = other DNA
agcagtgatgttgggaattataacctt

SEQ ID NO: 11496 - DNA, 18 bp, synthetic construct
  misc_feature 1..18: note = Synthetic construct
  source 1..18: mol_type = other DNA
aatattggaactaaagct

SEQ ID NO: 11497 - DNA, 18 bp, synthetic construct
  misc_feature 1..18: note = Synthetic construct
  source 1..18: mol_type = other DNA
aatattgaaagtaagagt

SEQ ID NO: 11498 - DNA, 24 bp, synthetic construct
  misc_feature 1..24: note = Synthetic construct
  source 1..24: mol_type = other DNA
agctccaacattgggaaaaattct

SEQ ID NO: 11499 - DNA, 33 bp, synthetic construct
  misc_feature 1..33: note = Synthetic construct
  source 1..33: mol_type = other DNA
cagagcctcctgcatagtgatggaaagacctat

SEQ ID NO: 11500 - DNA, 24 bp, synthetic construct
  misc_feature 1..24: note = Synthetic construct
  source 1..24: mol_type = other DNA
acctccaacatcggaagtaatact

SEQ ID NO: 11501 - DNA, 27 bp, synthetic construct
  misc_feature 1..27: note = Synthetic construct
  source 1..27: mol_type = other DNA
agcagtgatgttggaagttataacctt

SEQ ID NO: 11502 - DNA, 27 bp, synthetic construct
  misc_feature 1..27: note = Synthetic construct
  source 1..27: mol_type = other DNA
agcagtgacgttggtggttataactct

SEQ ID NO: 11503 - DNA, 24 bp, synthetic construct
  misc_feature 1..24: note = Synthetic construct
  source 1..24: mol_type = other DNA
agctccaacatcggaattaatact

SEQ ID NO: 11504 - DNA, 18 bp, synthetic construct
  misc_feature 1..18: note = Synthetic construct
  source 1..18: mol_type = other DNA
cagagcattagcagttct

SEQ ID NO: 11505 - DNA, 18 bp, synthetic construct
  misc_feature 1..18: note = Synthetic construct
  source 1..18: mol_type = other DNA
gaattgccaaagcaatat

SEQ ID NO: 11506 - DNA, 18 bp, synthetic construct
  misc_feature 1..18: note = Synthetic construct
  source 1..18: mol_type = other DNA
cagagtgttagtagtctc

SEQ ID NO: 11507 - DNA, 27 bp, synthetic construct
  misc_feature 1..27: note = Synthetic construct
  source 1..27: mol_type = other DNA
agcggtgacgttggtggttttaacttt

SEQ ID NO: 11508 - DNA, 18 bp, synthetic construct
  misc_feature 1..18: note = Synthetic construct
  source 1..18: mol_type = other DNA
cagaatgtaagaagctac

SEQ ID NO: 11509 - DNA, 18 bp, synthetic construct
  misc_feature 1..18: note = Synthetic construct
  source 1..18: mol_type = other DNA
ggattgccaaagcaatat

SEQ ID NO: 11510 - DNA, 21 bp, synthetic construct
  misc_feature 1..21: note = Synthetic construct
  source 1..21: mol_type = other DNA
cagagggttgacaggaagtac

SEQ ID NO: 11511 - DNA, 18 bp, synthetic construct
  misc_feature 1..18: note = Synthetic construct
  source 1..18: mol_type = other DNA
cgggccattgacaattat

SEQ ID NO: 11512 - DNA, 24 bp, synthetic construct
  misc_feature 1..24: note = Synthetic construct
  source 1..24: mol_type = other DNA
aactccaacattgggaataattat

SEQ ID NO: 11513 - DNA, 18 bp, synthetic construct
  misc_feature 1..18: note = Synthetic construct
  source 1..18: mol_type = other DNA
cagggcattgaaaatgat

SEQ ID NO: 11514 - DNA, 27 bp, synthetic construct
  misc_feature 1..27: note = Synthetic construct
  source 1..27: mol_type = other DNA
agaagtgatattgggacttataacctt

SEQ ID NO: 11515 - DNA, 18 bp, synthetic construct
  misc_feature 1..18: note = Synthetic construct
  source 1..18: mol_type = other DNA
tactttgaagttaaaagt

SEQ ID NO: 11516 - DNA, 18 bp, synthetic construct
  misc_feature 1..18: note = Synthetic construct
  source 1..18: mol_type = other DNA
aatattggaggtaaaact

SEQ ID NO: 11517 - DNA, 21 bp, synthetic construct
  misc_feature 1..21: note = Synthetic construct
  source 1..21: mol_type = other DNA
cagtatttttccagcaactac

SEQ ID NO: 11518 - DNA, 18 bp, synthetic construct
  misc_feature 1..18: note = Synthetic construct
  source 1..18: mol_type = other DNA
gagaacattagaaactgg

SEQ ID NO: 11519 - DNA, 21 bp, synthetic construct
  misc_feature 1..21: note = Synthetic construct
  source 1..21: mol_type = other DNA
cagagtcttagcagcgacttc

SEQ ID NO: 11520 - DNA, 21 bp, synthetic construct
  misc_feature 1..21: note = Synthetic construct
  source 1..21: mol_type = other DNA
cagagtgttagcgagaccaat

SEQ ID NO: 11521 - DNA, 18 bp, synthetic construct
  misc_feature 1..18: note = Synthetic construct
  source 1..18: mol_type = other DNA
accattggaggtgccact

SEQ ID NO: 11522 - DNA, 27 bp, synthetic construct
  misc_feature 1..27: note = Synthetic construct
  source 1..27: mol_type = other DNA
agcaatgatattgggagttataatctt

SEQ ID NO: 11523-11553 - skipped (31 entries)

SEQ ID NO: 11554 - DNA, 24 bp, synthetic construct
  misc_feature 1..24: note = Synthetic construct
  source 1..24: mol_type = other DNA
gtgggcactggtgggattgtggga

SEQ ID NO: 11555-11558 - skipped (4 entries)

SEQ ID NO: 11559 - DNA, 21 bp, synthetic construct
  misc_feature 1..21: note = Synthetic construct
  source 1..21: mol_type = other DNA
gttgatcctgacggcaattat

SEQ ID NO: 11560-11616 - skipped (57 entries)

SEQ ID NO: 11617 - DNA, 21 bp, synthetic construct
  misc_feature 1..21: note = Synthetic construct
  source 1..21: mol_type = other DNA
cttaacagtgatggcagccac

SEQ ID NO: 11618-11636 - skipped (19 entries)

SEQ ID NO: 11637 - DNA, 21 bp, synthetic construct
  misc_feature 1..21: note = Synthetic construct
  source 1..21: mol_type = other DNA
cttgatggtagtggaagctac

SEQ ID NO: 11638-11665 - skipped (28 entries)

SEQ ID NO: 11666 - DNA, 12 bp, synthetic construct
  misc_feature 1..12: note = Synthetic construct
  source 1..12: mol_type = other DNA
taccactcagac

SEQ ID NO: 11667-11731 - skipped (65 entries)

SEQ ID NO: 11732 - DNA, 21 bp, synthetic construct
  misc_feature 1..21: note = Synthetic construct
  source 1..21: mol_type = other DNA
tactactcagactcagataag

SEQ ID NO: 11733-11739 - skipped (7 entries)

SEQ ID NO: 11740 - DNA, 21 bp, synthetic construct
  misc_feature 1..21: note = Synthetic construct
  source 1..21: mol_type = other DNA
attaaaagtgatggcagttac

SEQ ID NO: 11741-11766 - skipped (26 entries)

SEQ ID NO: 11767 - DNA, 30 bp, synthetic construct
  misc_feature 1..30: note = Synthetic construct
  source 1..30: mol_type = other DNA
cagcagtatggtaggtcaccccagatcacc

SEQ ID NO: 11768 - DNA, 27 bp, synthetic construct
  misc_feature 1..27: note = Synthetic construct
  source 1..27: mol_type = other DNA
caacaatataagagtttttcttatact

SEQ ID NO: 11769 - DNA, 33 bp, synthetic construct
  misc_feature 1..33: note = Synthetic construct
  source 1..33: mol_type = other DNA
agctcatacagaagcagcaggattctttatgtc

SEQ ID NO: 11770 - DNA, 27 bp, synthetic construct
  misc_feature 1..27: note = Synthetic construct
  source 1..27: mol_type = other DNA
cagcaatatcatatgacccctccgacg

SEQ ID NO: 11771 - DNA, 24 bp, synthetic construct
  misc_feature 1..24: note = Synthetic construct
  source 1..24: mol_type = other DNA
cagcagtttggcagctcacccact

SEQ ID NO: 11772 - DNA, 33 bp, synthetic construct
  misc_feature 1..33: note = Synthetic construct
  source 1..33: mol_type = other DNA
cagcattatggtacctcacctccgatgtacacc

SEQ ID NO: 11773 - DNA, 27 bp, synthetic construct
  misc_feature 1..27: note = Synthetic construct
  source 1..27: mol_type = other DNA
ttgctctcccatagtggtgcttgggtg

SEQ ID NO: 11774 - DNA, 30 bp, synthetic construct
  misc_feature 1..30: note = Synthetic construct
  source 1..30: mol_type = other DNA
tcctcatatgcaggctcttacacttgggtg

SEQ ID NO: 11775 - DNA, 27 bp, synthetic construct
  misc_feature 1..27: note = Synthetic construct
  source 1..27: mol_type = other DNA
cagcagtatgatggctcacctcagacg

SEQ ID NO: 11776 - DNA, 27 bp, synthetic construct
  misc_feature 1..27: note = Synthetic construct
  source 1..27: mol_type = other DNA
caacagtatgatagttttccatacact

SEQ ID NO: 11777 - DNA, 36 bp, synthetic construct
  misc_feature 1..36: note = Synthetic construct
  source 1..36: mol_type = other DNA
agctcatatacaaacaacaacactcctcgttgggtg

SEQ ID NO: 11778 - DNA, 27 bp, synthetic construct
  misc_feature 1..27: note = Synthetic construct
  source 1..27: mol_type = other DNA
cagcaatattttgttcctcccctcact

SEQ ID NO: 11779 - DNA, 33 bp, synthetic construct
  misc_feature 1..33: note = Synthetic construct
  source 1..33: mol_type = other DNA
caatcaacagacagtagtggtgattattggctg

SEQ ID NO: 11780 - DNA, 33 bp, synthetic construct
  misc_feature 1..33: note = Synthetic construct
  source 1..33: mol_type = other DNA
acctcatatacaaacaacagcaattctcaggta

SEQ ID NO: 11781 - DNA, 24 bp, synthetic construct
  misc_feature 1..24: note = Synthetic construct
  source 1..24: mol_type = other DNA
cagcagcgcagcaactggatcacc

SEQ ID NO: 11782 - DNA, 27 bp, synthetic construct
  misc_feature 1..27: note = Synthetic construct
  source 1..27: mol_type = other DNA
cagcaatattatagtactcctcccacg

SEQ ID NO: 11783 - DNA, 27 bp, synthetic construct
  misc_feature 1..27: note = Synthetic construct
  source 1..27: mol_type = other DNA
cagcagtatggtccctcactttgcacc

SEQ ID NO: 11784 - DNA, 33 bp, synthetic construct
  misc_feature 1..33: note = Synthetic construct
  source 1..33: mol_type = other DNA
acctcatatacaaacaacagcaattctcagata

SEQ ID NO: 11785 - DNA, 27 bp, synthetic construct
  misc_feature 1..27: note = Synthetic construct
  source 1..27: mol_type = other DNA
cagcaatattatagtgctcctttcact

SEQ ID NO: 11786 - DNA, 33 bp, synthetic construct
  misc_feature 1..33: note = Synthetic construct
  source 1..33: mol_type = other DNA
cagtcctatgacagcaggctgactacttgggtg

SEQ ID NO: 11787 - DNA, 30 bp, synthetic construct
  misc_feature 1..30: note = Synthetic construct
  source 1..30: mol_type = other DNA
agctcatatgcaggcaacaacaattatctc

SEQ ID NO: 11788 - DNA, 27 bp, synthetic construct
  misc_feature 1..27: note = Synthetic construct
  source 1..27: mol_type = other DNA
cagcaatattatacttctacgtggacg

SEQ ID NO: 11789 - DNA, 33 bp, synthetic construct
  misc_feature 1..33: note = Synthetic construct
  source 1..33: mol_type = other DNA
aattcccgcgacagcagtggtgaccgttatgtc

SEQ ID NO: 11790 - DNA, 30 bp, synthetic construct
  misc_feature 1..30: note = Synthetic construct
  source 1..30: mol_type = other DNA
cactcttatgatagcgccaatccagggata

SEQ ID NO: 11791 - DNA, 27 bp, synthetic construct
  misc_feature 1..27: note = Synthetic construct
  source 1..27: mol_type = other DNA
ctacaacattattctactcctcagact

SEQ ID NO: 11792 - DNA, 27 bp, synthetic construct
  misc_feature 1..27: note = Synthetic construct
  source 1..27: mol_type = other DNA
catcagagtagtgccttaattcaaact

SEQ ID NO: 11793 - DNA, 27 bp, synthetic construct
  misc_feature 1..27: note = Synthetic construct
  source 1..27: mol_type = other DNA
cagcactatggtagctcattgtggacg

SEQ ID NO: 11794 - DNA, 33 bp, synthetic construct
  misc_feature 1..33: note = Synthetic construct
  source 1..33: mol_type = other DNA
cagcagtatggcagctcacctcccccgtacact

SEQ ID NO: 11795 - DNA, 24 bp, synthetic construct
  misc_feature 1..24: note = Synthetic construct
  source 1..24: mol_type = other DNA
cagcagtatggtggctcacccact

SEQ ID NO: 11796 - DNA, 27 bp, synthetic construct
  misc_feature 1..27: note = Synthetic construct
  source 1..27: mol_type = other DNA
cagcagtacggtagttcagtgtggacg

SEQ ID NO: 11797 - DNA, 33 bp, synthetic construct
  misc_feature 1..33: note = Synthetic construct
  source 1..33: mol_type = other DNA
caggtgtgggatagcagtagtgatcatgtggca

SEQ ID NO: 11798 - DNA, 36 bp, synthetic construct
  misc_feature 1..36: note = Synthetic construct
  source 1..36: mol_type = other DNA
tcagcatgggatgaaagtctgaatggtcatgtgata

SEQ ID NO: 11799 - DNA, 24 bp, synthetic construct
  misc_feature 1..24: note = Synthetic construct
  source 1..24: mol_type = other DNA
caacagagcttcagtagtgtcacc

SEQ ID NO: 11800 - DNA, 33 bp, synthetic construct
  misc_feature 1..33: note = Synthetic construct
  source 1..33: mol_type = other DNA
tgctcaaatgcaggttgtaggacttggggtgtc

SEQ ID NO: 11801 - DNA, 27 bp, synthetic construct
  misc_feature 1..27: note = Synthetic construct
  source 1..27: mol_type = other DNA
atgcaaggtatataccttccgctcact

SEQ ID NO: 11802 - DNA, 27 bp, synthetic construct
  misc_feature 1..27: note = Synthetic construct
  source 1..27: mol_type = other DNA
caacagcttaatagtaacccattcact

SEQ ID NO: 11803 - DNA, 24 bp, synthetic construct
  misc_feature 1..24: note = Synthetic construct
  source 1..24: mol_type = other DNA
caacagtattatagttaccccttt

SEQ ID NO: 11804 - DNA, 27 bp, synthetic construct
  misc_feature 1..27: note = Synthetic construct
  source 1..27: mol_type = other DNA
caacagtattatagttacccgtggacg

SEQ ID NO: 11805 - DNA, 30 bp, synthetic construct
  misc_feature 1..30: note = Synthetic construct
  source 1..30: mol_type = other DNA
cagtcatcagacagcagtggtaattttgtc

SEQ ID NO: 11806 - DNA, 36 bp, synthetic construct
  misc_feature 1..36: note = Synthetic construct
  source 1..36: mol_type = other DNA
gcagcatgggatgacagcctgggtggtggggatgtc

SEQ ID NO: 11807 - DNA, 33 bp, synthetic construct
  misc_feature 1..33: note = Synthetic construct
  source 1..33: mol_type = other DNA
ctacagtataatagttcttcttcaacatacact

SEQ ID NO: 11808 - DNA, 30 bp, synthetic construct
  misc_feature 1..30: note = Synthetic construct
  source 1..30: mol_type = other DNA
tgctcgtatgcagggactagcactttcgtg

SEQ ID NO: 11809 - DNA, 27 bp, synthetic construct
  misc_feature 1..27: note = Synthetic construct
  source 1..27: mol_type = other DNA
gaacaggctaacagtttcccgctcact

SEQ ID NO: 11810 - DNA, 39 bp, synthetic construct
  misc_feature 1..39: note = Synthetic construct
  source 1..39: mol_type = other DNA
ggggcagaccatgacagtgggagcaacttcgtttatgtc

SEQ ID NO: 11811 - DNA, 27 bp, synthetic construct
  misc_feature 1..27: note = Synthetic construct
  source 1..27: mol_type = other DNA
caacaacttaatggttaccctccaact

SEQ ID NO: 11812 - DNA, 27 bp, synthetic construct
  misc_feature 1..27: note = Synthetic construct
  source 1..27: mol_type = other DNA
caccagtatagtacctcaccgtggacg

SEQ ID NO: 11813 - DNA, 27 bp, synthetic construct
  misc_feature 1..27: note = Synthetic construct
  source 1..27: mol_type = other DNA
caccaatattataatattcctcgaaca

SEQ ID NO: 11814 - DNA, 24 bp, synthetic construct
  misc_feature 1..24: note = Synthetic construct
  source 1..24: mol_type = other DNA
caccaatattatagtactctcact

SEQ ID NO: 11815 - DNA, 24 bp, synthetic construct
  misc_feature 1..24: note = Synthetic construct
  source 1..24: mol_type = other DNA
atgcaaggtacacacctttacacc

SEQ ID NO: 11816 - DNA, 27 bp, synthetic construct
  misc_feature 1..27: note = Synthetic construct
  source 1..27: mol_type = other DNA
caacatttttatagtagtcctccgact

SEQ ID NO: 11817 - DNA, 33 bp, synthetic construct
  misc_feature 1..33: note = Synthetic construct
  source 1..33: mol_type = other DNA
agctcatatagacgtgacatcgccctttatgtc

SEQ ID NO: 11818 - DNA, 33 bp, synthetic construct
  misc_feature 1..33: note = Synthetic construct
  source 1..33: mol_type = other DNA
acctcatatacaaacgacagcaattctcaggta

SEQ ID NO: 11819 - DNA, 33 bp, synthetic construct
  misc_feature 1..33: note = Synthetic construct
  source 1..33: mol_type = other DNA
tgttcgtatgcaagtagtagcactttcgtgatt

SEQ ID NO: 11820 - DNA, 33 bp, synthetic construct
  misc_feature 1..33: note = Synthetic construct
  source 1..33: mol_type = other DNA
caggtgtgggatagtagtagtgatcattatgtc

SEQ ID NO: 11821 - DNA, 30 bp, synthetic construct
  misc_feature 1..30: note = Synthetic construct
  source 1..30: mol_type = other DNA
caccagcggagcagctggcctccgtacact

SEQ ID NO: 11822 - DNA, 27 bp, synthetic construct
  misc_feature 1..27: note = Synthetic construct
  source 1..27: mol_type = other DNA
atgcagggtacacactggcctcggacg

SEQ ID NO: 11823 - DNA, 27 bp, synthetic construct
  misc_feature 1..27: note = Synthetic construct
  source 1..27: mol_type = other DNA
cagcaatataataactggccgtacact

SEQ ID NO: 11824 - DNA, 27 bp, synthetic construct
  misc_feature 1..27: note = Synthetic construct
  source 1..27: mol_type = other DNA
cagacctgggacactggcgttcgcctg

SEQ ID NO: 11825 - DNA, 36 bp, synthetic construct
  misc_feature 1..36: note = Synthetic construct
  source 1..36: mol_type = other DNA
cagtcctatgacttcagcctgagtggttcggatgtc

SEQ ID NO: 11826 - DNA, 27 bp, synthetic construct
  misc_feature 1..27: note = Synthetic construct
  source 1..27: mol_type = other DNA
caacagtatggtacttcacctgtcact

SEQ ID NO: 11827 - DNA, 30 bp, synthetic construct
  misc_feature 1..30: note = Synthetic construct
  source 1..30: mol_type = other DNA
gagcaacgtattagctggcctggaatcacc

SEQ ID NO: 11828 - DNA, 27 bp, synthetic construct
  misc_feature 1..27: note = Synthetic construct
  source 1..27: mol_type = other DNA
cagcagtacggttattcacggtggaca

SEQ ID NO: 11829 - DNA, 27 bp, synthetic construct
  misc_feature 1..27: note = Synthetic construct
  source 1..27: mol_type = other DNA
atgcaaggtacacactggcctccgggg

SEQ ID NO: 11830 - DNA, 30 bp, synthetic construct
  misc_feature 1..30: note = Synthetic construct
  source 1..30: mol_type = other DNA
tgctcatatgcagctagtagagttaaggtg

SEQ ID NO: 11831 - DNA, 27 bp, synthetic construct
  misc_feature 1..27: note = Synthetic construct
  source 1..27: mol_type = other DNA
caccaatattatactcctccattcact

SEQ ID NO: 11832 - DNA, 30 bp, synthetic construct
  misc_feature 1..30: note = Synthetic construct
  source 1..30: mol_type = other DNA
ctccaccgtaacaactggcctcccttcact

SEQ ID NO: 11833 - DNA, 30 bp, synthetic construct
  misc_feature 1..30: note = Synthetic construct
  source 1..30: mol_type = other DNA
ttgctctcctatagtggtgctcattatgtc

SEQ ID NO: 11834 - DNA, 27 bp, synthetic construct
  misc_feature 1..27: note = Synthetic construct
  source 1..27: mol_type = other DNA
ctacagcatgatagttaccccctcact

SEQ ID NO: 11835 - DNA, 27 bp, synthetic construct
  misc_feature 1..27: note = Synthetic construct
  source 1..27: mol_type = other DNA
ctgcagcatattacctggccttggaca

SEQ ID NO: 11836 - DNA, 30 bp, synthetic construct
  misc_feature 1..30: note = Synthetic construct
  source 1..30: mol_type = other DNA
atgcaaggtacagactggcccccgtacact

SEQ ID NO: 11837 - DNA, 30 bp, synthetic construct
  misc_feature 1..30: note = Synthetic construct
  source 1..30: mol_type = other DNA
atgcaaggtacacactggcctccggtgacg

SEQ ID NO: 11838 - DNA, 27 bp, synthetic construct
  misc_feature 1..27: note = Synthetic construct
  source 1..27: mol_type = other DNA
cagcactatgatcatctcccgtggacc

SEQ ID NO: 11839 - DNA, 27 bp, synthetic construct
  misc_feature 1..27: note = Synthetic construct
  source 1..27: mol_type = other DNA
caacagtgtgatgatctcccgtacact

SEQ ID NO: 11840 - DNA, 27 bp, synthetic construct
  misc_feature 1..27: note = Synthetic construct
  source 1..27: mol_type = other DNA
caacagttttatggtgccccattcact

SEQ ID NO: 11841 - DNA, 27 bp, synthetic construct
  misc_feature 1..27: note = Synthetic construct
  source 1..27: mol_type = other DNA
cagcagcgcagcaactggcctctcact

SEQ ID NO: 11842 - DNA, 27 bp, synthetic construct
  misc_feature 1..27: note = Synthetic construct
  source 1..27: mol_type = other DNA
caacagagttacgcctccccgactacg

SEQ ID NO: 11843 - DNA, 27 bp, synthetic construct
  misc_feature 1..27: note = Synthetic construct
  source 1..27: mol_type = other DNA
caacagagttacagaattcctcacacc

SEQ ID NO: 11844 - DNA, 27 bp, synthetic construct
  misc_feature 1..27: note = Synthetic construct
  source 1..27: mol_type = other DNA
caacagagttacagtaccccgctcact

SEQ ID NO: 11845 - DNA, 24 bp, synthetic construct
  misc_feature 1..24: note = Synthetic construct
  source 1..24: mol_type = other DNA
caacagacttacaatacgatcact

SEQ ID NO: 11846 - DNA, 27 bp, synthetic construct
  misc_feature 1..27: note = Synthetic construct
  source 1..27: mol_type = other DNA
caacaatatgatagtctcccggtcact

SEQ ID NO: 11847 - DNA, 27 bp, synthetic construct
  misc_feature 1..27: note = Synthetic construct
  source 1..27: mol_type = other DNA
caacaatatggtagctccctgtacagt

SEQ ID NO: 11848 - DNA, 27 bp, synthetic construct
  misc_feature 1..27: note = Synthetic construct
  source 1..27: mol_type = other DNA
cagcagtatggtagctcaccgctcact

SEQ ID NO: 11849 - DNA, 33 bp, synthetic construct
  misc_feature 1..33: note = Synthetic construct
  source 1..33: mol_type = other DNA
cagcagtatggtagctcacctccgcggttcact

SEQ ID NO: 11850 - DNA, 27 bp, synthetic construct
  misc_feature 1..27: note = Synthetic construct
  source 1..27: mol_type = other DNA
cagcagtacggctatctgccactgact

SEQ ID NO: 11851 - DNA, 27 bp, synthetic construct
  misc_feature 1..27: note = Synthetic construct
  source 1..27: mol_type = other DNA
caacagtataatgcttacccattcact

SEQ ID NO: 11852 - DNA, 30 bp, synthetic construct
  misc_feature 1..30: note = Synthetic construct
  source 1..30: mol_type = other DNA
cagcagtataatcattggctccctctcact

SEQ ID NO: 11853 - DNA, 30 bp, synthetic construct
  misc_feature 1..30: note = Synthetic construct
  source 1..30: mol_type = other DNA
cagcaatataataagtggcctccgtggacg

SEQ ID NO: 11854 - DNA, 30 bp, synthetic construct
  misc_feature 1..30: note = Synthetic construct
  source 1..30: mol_type = other DNA
cagcagtataataactggcccccattcact

SEQ ID NO: 11855 - DNA, 27 bp, synthetic construct
  misc_feature 1..27: note = Synthetic construct
  source 1..27: mol_type = other DNA
cagcagtataatagctggccatttact

SEQ ID NO: 11856 - DNA, 24 bp, synthetic construct
  misc_feature 1..24: note = Synthetic construct
  source 1..24: mol_type = other DNA
caacagtataatagttattggacg

SEQ ID NO: 11857 - DNA, 30 bp, synthetic construct
  misc_feature 1..30: note = Synthetic construct
  source 1..30: mol_type = other DNA
cagcaatataatgtctggcctacgatcacc

SEQ ID NO: 11858 - DNA, 27 bp, synthetic construct
  misc_feature 1..27: note = Synthetic construct
  source 1..27: mol_type = other DNA
cagcagtatcgtagctcaccattcact

SEQ ID NO: 11859 - DNA, 27 bp, synthetic construct
  misc_feature 1..27: note = Synthetic construct
  source 1..27: mol_type = other DNA
cagcagtatcgttactcaccgaggacg

SEQ ID NO: 11860 - DNA, 24 bp, synthetic construct
  misc_feature 1..24: note = Synthetic construct
  source 1..24: mol_type = other DNA
cagcaatattctagtttcgggact

SEQ ID NO: 11861 - DNA, 27 bp, synthetic construct
  misc_feature 1..27: note = Synthetic construct
  source 1..27: mol_type = other DNA
cagcaatattataatactccgtacact

SEQ ID NO: 11862 - DNA, 27 bp, synthetic construct
  misc_feature 1..27: note = Synthetic construct
  source 1..27: mol_type = other DNA
caacagtattatagtttccctcgaacg

SEQ ID NO: 11863 - DNA, 27 bp, synthetic construct
  misc_feature 1..27: note = Synthetic construct
  source 1..27: mol_type = other DNA
cagcaatattatagtactccgtacact

SEQ ID NO: 11864 - DNA, 27 bp, synthetic construct
  misc_feature 1..27: note = Synthetic construct
  source 1..27: mol_type = other DNA
caacagtattatagttaccctctaacg

SEQ ID NO: 11865 - DNA, 27 bp, synthetic construct
  misc_feature 1..27: note = Synthetic construct
  source 1..27: mol_type = other DNA
caacagtattatactattccgcggacg

SEQ ID NO: 11866 - DNA, 33 bp, synthetic construct
  misc_feature 1..33: note = Synthetic construct
  source 1..33: mol_type = other DNA
caatcagcagacagcggtggtacttctgtgaca

SEQ ID NO: 11867 - DNA, 33 bp, synthetic construct
  misc_feature 1..33: note = Synthetic construct
  source 1..33: mol_type = other DNA
cagtcccgggacagcagtggtaaccagctggtg

SEQ ID NO: 11868 - DNA, 30 bp, synthetic construct
  misc_feature 1..30: note = Synthetic construct
  source 1..30: mol_type = other DNA
caatcagtagacagaagtggttctcatgtc

SEQ ID NO: 11869 - DNA, 33 bp, synthetic construct
  misc_feature 1..33: note = Synthetic construct
  source 1..33: mol_type = other DNA
caggtgtgggatagtagtagtgatcattgggtg

SEQ ID NO: 11870 - DNA, 33 bp, synthetic construct
  misc_feature 1..33: note = Synthetic construct
  source 1..33: mol_type = other DNA
acctcatatacaaacgacagcaattctcaggca

SEQ ID NO: 11871 - DNA, 33 bp, synthetic construct
  misc_feature 1..33: note = Synthetic construct
  source 1..33: mol_type = other DNA
acctcatatacaaacgacagcaattctcagcta

SEQ ID NO: 11872 - DNA, 33 bp, synthetic construct
  misc_feature 1..33: note = Synthetic construct
  source 1..33: mol_type = other DNA
acctcatatacaaacgacaccaattctcaggta

SEQ ID NO: 11873 - DNA, 33 bp, synthetic construct
  misc_feature 1..33: note = Synthetic construct
  source 1..33: mol_type = other DNA
acctcatatacaaacaacaacaattctcaggta

SEQ ID NO: 11874 - DNA, 33 bp, synthetic construct
  misc_feature 1..33: note = Synthetic construct
  source 1..33: mol_type = other DNA
acctcatatacaaacaacagcaattctcatgta

SEQ ID NO: 11875 - DNA, 33 bp, synthetic construct
  misc_feature 1..33: note = Synthetic construct
  source 1..33: mol_type = other DNA
acctcatatacaaacaacagcaattcccaggta

SEQ ID NO: 11876 - DNA, 27 bp, synthetic construct
  misc_feature 1..27: note = Synthetic construct
  source 1..27: mol_type = other DNA
caacactatgatcatctccctctcact

SEQ ID NO: 11877 - DNA, 27 bp, synthetic construct
  misc_feature 1..27: note = Synthetic construct
  source 1..27: mol_type = other DNA
cagcagtatggtagctcaccgtggacg

SEQ ID NO: 11878 - DNA, 27 bp, synthetic construct
  misc_feature 1..27: note = Synthetic construct
  source 1..27: mol_type = other DNA
cagcagtattatagtacttcgtggacg

SEQ ID NO: 11879 - DNA, 24 bp, synthetic construct
  misc_feature 1..24: note = Synthetic construct
  source 1..24: mol_type = other DNA
cagcaatatggtaattcagggacg

SEQ ID NO: 11880 - DNA, 24 bp, synthetic construct
  misc_feature 1..24: note = Synthetic construct
  source 1..24: mol_type = other DNA
cagcagtatggtggctcatccacc

SEQ ID NO: 11881 - DNA, 30 bp, synthetic construct
  misc_feature 1..30: note = Synthetic construct
  source 1..30: mol_type = other DNA
cagcagcgtagcaactggccttcgctcact

SEQ ID NO: 11882 - DNA, 36 bp, synthetic construct
  misc_feature 1..36: note = Synthetic construct
  source 1..36: mol_type = other DNA
aactcccgggacagcagtggtaaccatctgggggtc

SEQ ID NO: 11883 - DNA, 33 bp, synthetic construct
  misc_feature 1..33: note = Synthetic construct
  source 1..33: mol_type = other DNA
caggtgtgggatagtagtagtgatcatgtggta

SEQ ID NO: 11884 - DNA, 27 bp, synthetic construct
  misc_feature 1..27: note = Synthetic construct
  source 1..27: mol_type = other DNA
cagcagtataagagctggcccctcgcg

SEQ ID NO: 11885 - DNA, 33 bp, synthetic construct
  misc_feature 1..33: note = Synthetic construct
  source 1..33: mol_type = other DNA
gcagcgtgggatgacaccctgagtgcttgggtg

SEQ ID NO: 11886 - DNA, 27 bp, synthetic construct
  misc_feature 1..27: note = Synthetic construct
  source 1..27: mol_type = other DNA
cagcagtatggtagctcacctcaaacg

SEQ ID NO: 11887 - DNA, 30 bp, synthetic construct
  misc_feature 1..30: note = Synthetic construct
  source 1..30: mol_type = other DNA
cagcagcgtagcaactggcctccgtggacg

SEQ ID NO: 11888 - DNA, 27 bp, synthetic construct
  misc_feature 1..27: note = Synthetic construct
  source 1..27: mol_type = other DNA
atgcaacgtatagagtttccgtggacg

SEQ ID NO: 11889 - DNA, 36 bp, synthetic construct
  misc_feature 1..36: note = Synthetic construct
  source 1..36: mol_type = other DNA
gcagcatgggatgacagcctgagtggtcggggggta

SEQ ID NO: 11890 - DNA, 27 bp, synthetic construct
  misc_feature 1..27: note = Synthetic construct
  source 1..27: mol_type = other DNA
caacagagttacagtaccccgtacact

SEQ ID NO: 11891 - DNA, 30 bp, synthetic construct
  misc_feature 1..30: note = Synthetic construct
  source 1..30: mol_type = other DNA
tgctcatatgcaggcagctacacttgggtg

SEQ ID NO: 11892 - DNA, 27 bp, synthetic construct
  misc_feature 1..27: note = Synthetic construct
  source 1..27: mol_type = other DNA
gtacaggattacgattaccctcataca

SEQ ID NO: 11893 - DNA, 33 bp, synthetic construct
  misc_feature 1..33: note = Synthetic construct
  source 1..33: mol_type = other DNA
acctcatatacaaacgacagcaattctcaggtc

SEQ ID NO: 11894 - DNA, 33 bp, synthetic construct
  misc_feature 1..33: note = Synthetic construct
  source 1..33: mol_type = other DNA
caatcagtaggcactaatcatctttctgtggtc

SEQ ID NO: 11895 - DNA, 33 bp, synthetic construct
  misc_feature 1..33: note = Synthetic construct
  source 1..33: mol_type = other DNA
acctcatatgcaggcagcaacaatttcagggtc

SEQ ID NO: 11896 - DNA, 33 bp, synthetic construct
  misc_feature 1..33: note = Synthetic construct
  source 1..33: mol_type = other DNA
gccgcttgggatgaccacctgcgaattgtgggt

SEQ ID NO: 11897 - DNA, 33 bp, synthetic construct
  misc_feature 1..33: note = Synthetic construct
  source 1..33: mol_type = other DNA
caatcttatgataccaccacggatcatgcagtc

SEQ ID NO: 11898 - DNA, 27 bp, synthetic construct
  misc_feature 1..27: note = Synthetic construct
  source 1..27: mol_type = other DNA
caacagtatcatagtaccccgtggacg

SEQ ID NO: 11899 - DNA, 27 bp, synthetic construct
  misc_feature 1..27: note = Synthetic construct
  source 1..27: mol_type = other DNA
ctacaacataatagttaccctcgaacg

SEQ ID NO: 11900 - DNA, 27 bp, synthetic construct
  misc_feature 1..27: note = Synthetic construct
  source 1..27: mol_type = other DNA
caacagtatagtactgattcggcgacg

SEQ ID NO: 11901 - DNA, 36 bp, synthetic construct
  misc_feature 1..36: note = Synthetic construct
  source 1..36: mol_type = other DNA
cagtcctatgacagtagcctgagtgattcgaaagta

SEQ ID NO: 11902 - DNA, 27 bp, synthetic construct
  misc_feature 1..27: note = Synthetic construct
  source 1..27: mol_type = other DNA
cagcaatcttatactagtcctgtcact

SEQ ID NO: 11903 - DNA, 27 bp, synthetic construct
  misc_feature 1..27: note = Synthetic construct
  source 1..27: mol_type = other DNA
cagcagtatgcttcctcaccggtcact

SEQ ID NO: 11904 - DNA, 27 bp, synthetic construct
  misc_feature 1..27: note = Synthetic construct
  source 1..27: mol_type = other DNA
caacactgtgatagttatccgtggacg

SEQ ID NO: 11905 - DNA, 27 bp, synthetic construct
  misc_feature 1..27: note = Synthetic construct
  source 1..27: mol_type = other DNA
tactctgcggctgacaacaatcgagtc

SEQ ID NO: 11906 - DNA, 33 bp, synthetic construct
  misc_feature 1..33: note = Synthetic construct
  source 1..33: mol_type = other DNA
caggcgtgggatgttgatagtgatcaaatggtt

SEQ ID NO: 11907 - DNA, 24 bp, synthetic construct
  misc_feature 1..24: note = Synthetic construct
  source 1..24: mol_type = other DNA
cagcagtatgctacctcaccgact

SEQ ID NO: 11908 - DNA, 30 bp, synthetic construct
  misc_feature 1..30: note = Synthetic construct
  source 1..30: mol_type = other DNA
cagcagtattataactggcctccgcacact

SEQ ID NO: 11909 - DNA, 27 bp, synthetic construct
  misc_feature 1..27: note = Synthetic construct
  source 1..27: mol_type = other DNA
ctgcggtgtaacggtttccctctcact

SEQ ID NO: 11910 - DNA, 30 bp, synthetic construct
  misc_feature 1..30: note = Synthetic construct
  source 1..30: mol_type = other DNA
cagcactatcctatgtcacctccgatcacc

SEQ ID NO: 11911 - DNA, 24 bp, synthetic construct
  misc_feature 1..24: note = Synthetic construct
  source 1..24: mol_type = other DNA
caacagtatcagagttattcgact

SEQ ID NO: 11912 - DNA, 33 bp, synthetic construct
  misc_feature 1..33: note = Synthetic construct
  source 1..33: mol_type = other DNA
gcagcatgggatgacaccctgcatggtgtggtt

SEQ ID NO: 11913 - DNA, 27 bp, synthetic construct
  misc_feature 1..27: note = Synthetic construct
  source 1..27: mol_type = other DNA
tactctgcggctgacaagagtctggta

SEQ ID NO: 11914 - DNA, 36 bp, synthetic construct
  misc_feature 1..36: note = Synthetic construct
  source 1..36: mol_type = other DNA
caatccgcagacagtagtggttcttatcctgtggtt

SEQ ID NO: 11915 - DNA, 30 bp, synthetic construct
  misc_feature 1..30: note = Synthetic construct
  source 1..30: mol_type = other DNA
agctcattggaaggcaggaacaattgggtg

SEQ ID NO: 11916 - DNA, 27 bp, synthetic construct
  misc_feature 1..27: note = Synthetic construct
  source 1..27: mol_type = other DNA
caacagtataagagttacaagtggacg

SEQ ID NO: 11917 - DNA, 36 bp, synthetic construct
  misc_feature 1..36: note = Synthetic construct
  source 1..36: mol_type = other DNA
cagtcctttgacaacagtgtgggtgtccaagtgatt

SEQ ID NO: 11918 - DNA, 27 bp, synthetic construct
  misc_feature 1..27: note = Synthetic construct
  source 1..27: mol_type = other DNA
atgcagcatctaaaaattcctcggact

SEQ ID NO: 11919 - DNA, 33 bp, synthetic construct
  misc_feature 1..33: note = Synthetic construct
  source 1..33: mol_type = other DNA
cagcagtatagtggctcacttcccccatacact

SEQ ID NO: 11920 - DNA, 27 bp, synthetic construct
  misc_feature 1..27: note = Synthetic construct
  source 1..27: mol_type = other DNA
cagtcttatgatggcagcaatcagtta

SEQ ID NO: 11921 - DNA, 33 bp, synthetic construct
  misc_feature 1..33: note = Synthetic construct
  source 1..33: mol_type = other DNA
caacagtataatacttactctcccacgtgggca

SEQ ID NO: 11922 - DNA, 27 bp, synthetic construct
  misc_feature 1..27: note = Synthetic construct
  source 1..27: mol_type = other DNA
caacactataatagttacccgtacact

SEQ ID NO: 11923 - DNA, 30 bp, synthetic construct
  misc_feature 1..30: note = Synthetic construct
  source 1..30: mol_type = other DNA
caggcgtgggacagcaacacttttgtgatg

SEQ ID NO: 11924 - DNA, 30 bp, synthetic construct
  misc_feature 1..30: note = Synthetic construct
  source 1..30: mol_type = other DNA
caacaatataatgactggcctccggtcact

SEQ ID NO: 11925 - DNA, 24 bp, synthetic construct
  misc_feature 1..24: note = Synthetic construct
  source 1..24: mol_type = other DNA
cagcaatatggtagctcacccact

SEQ ID NO: 11926 - DNA, 27 bp, synthetic construct
  misc_feature 1..27: note = Synthetic construct
  source 1..27: mol_type = other DNA
cagcagtattttcgtagtcctcacacg

SEQ ID NO: 11927 - DNA, 27 bp, synthetic construct
  misc_feature 1..27: note = Synthetic construct
  source 1..27: mol_type = other DNA
atgcaagggacacactggcctctgact

SEQ ID NO: 11928 - DNA, 27 bp, synthetic construct
  misc_feature 1..27: note = Synthetic construct
  source 1..27: mol_type = other DNA
caacagtataatagtctcccgtggacg

SEQ ID NO: 11929 - DNA, 30 bp, synthetic construct
  misc_feature 1..30: note = Synthetic construct
  source 1..30: mol_type = other DNA
cagcaatttggtggctcccctctgtacact

SEQ ID NO: 11930 - DNA, 30 bp, synthetic construct
  misc_feature 1..30: note = Synthetic construct
  source 1..30: mol_type = other DNA
cagcagtattatgactggcctccgtggacg

SEQ ID NO: 11931 - DNA, 36 bp, synthetic construct
  misc_feature 1..36: note = Synthetic construct
  source 1..36: mol_type = other DNA
gttgcatgggatgtcaatctgagtggtcctgtgctc

SEQ ID NO: 11932 - DNA, 30 bp, synthetic construct
  misc_feature 1..30: note = Synthetic construct
  source 1..30: mol_type = other DNA
caacagagttacagtaccctcgcggtcact

SEQ ID NO: 11933 - DNA, 30 bp, synthetic construct
  misc_feature 1..30: note = Synthetic construct
  source 1..30: mol_type = other DNA
cttctctatatgggtactggctcttgggtg

SEQ ID NO: 11934 - DNA, 27 bp, synthetic construct
  misc_feature 1..27: note = Synthetic construct
  source 1..27: mol_type = other DNA
cagcagtatgttagttcacccctgacg

SEQ ID NO: 11935 - DNA, 27 bp, synthetic construct
  misc_feature 1..27: note = Synthetic construct
  source 1..27: mol_type = other DNA
caccagtatggtagttcagcgaggact

SEQ ID NO: 11936 - DNA, 27 bp, synthetic construct
  misc_feature 1..27: note = Synthetic construct
  source 1..27: mol_type = other DNA
caacactatgatagatattcagcgacg

SEQ ID NO: 11937 - DNA, 27 bp, synthetic construct
  misc_feature 1..27: note = Synthetic construct
  source 1..27: mol_type = other DNA
caacagtatggcagttcgcctcagacg

SEQ ID NO: 11938 - DNA, 24 bp, synthetic construct
  misc_feature 1..24: note = Synthetic construct
  source 1..24: mol_type = other DNA
catcagagtagtagttggtacact

SEQ ID NO: 11939 - DNA, 33 bp, synthetic construct
  misc_feature 1..33: note = Synthetic construct
  source 1..33: mol_type = other DNA
cagcagcggagcaatgggcgtccgagggtcact

SEQ ID NO: 11940 - DNA, 27 bp, synthetic construct
  misc_feature 1..27: note = Synthetic construct
  source 1..27: mol_type = other DNA
ctacaagattacaattacccctggaag

SEQ ID NO: 11941 - DNA, 27 bp, synthetic construct
  misc_feature 1..27: note = Synthetic construct
  source 1..27: mol_type = other DNA
caacagagttacagtaccccgtggacg

SEQ ID NO: 11942 - DNA, 24 bp, synthetic construct
  misc_feature 1..24: note = Synthetic construct
  source 1..24: mol_type = other DNA
cagcagtatggtagctcaccaacg

SEQ ID NO: 11943 - DNA, 27 bp, synthetic construct
  misc_feature 1..27: note = Synthetic construct
  source 1..27: mol_type = other DNA
atgcaagctacacaatttcctcagacg

SEQ ID NO: 11944 - DNA, 30 bp, synthetic construct
  misc_feature 1..30: note = Synthetic construct
  source 1..30: mol_type = other DNA
cagcagtataataactggcctacgtacact

SEQ ID NO: 11945 - DNA, 33 bp, synthetic construct
  misc_feature 1..33: note = Synthetic construct
  source 1..33: mol_type = other DNA
caatcagcagacagcagtggtacttatgtggta

SEQ ID NO: 11946 - DNA, 30 bp, synthetic construct
  misc_feature 1..30: note = Synthetic construct
  source 1..30: mol_type = other DNA
tgctcatatgcaggcagctacacttatgtc

SEQ ID NO: 11947 - DNA, 27 bp, synthetic construct
  misc_feature 1..27: note = Synthetic construct
  source 1..27: mol_type = other DNA
ctacaggattacaattacccgtgggcg

SEQ ID NO: 11948 - DNA, 27 bp, synthetic construct
  misc_feature 1..27: note = Synthetic construct
  source 1..27: mol_type = other DNA
cagtcttatgaaaacagttattgggtg

SEQ ID NO: 11949 - DNA, 27 bp, synthetic construct
  misc_feature 1..27: note = Synthetic construct
  source 1..27: mol_type = other DNA
cagcaatattataactggcctcggacg

SEQ ID NO: 11950 - DNA, 33 bp, synthetic construct
  misc_feature 1..33: note = Synthetic construct
  source 1..33: mol_type = other DNA
caggtgtgggatagtagtggtgatcatccggtg

SEQ ID NO: 11951 - DNA, 30 bp, synthetic construct
  misc_feature 1..30: note = Synthetic construct
  source 1..30: mol_type = other DNA
tgctcatatgcaggcagctacactcatgtc

SEQ ID NO: 11952 - DNA, 30 bp, synthetic construct
  misc_feature 1..30: note = Synthetic construct
  source 1..30: mol_type = other DNA
caggaatttcatgatactctcgggctcact

SEQ ID NO: 11953 - DNA, 27 bp, synthetic construct
  misc_feature 1..27: note = Synthetic construct
  source 1..27: mol_type = other DNA
cagcagacttacagtgccccatggacg

SEQ ID NO: 11954 - DNA, 30 bp, synthetic construct
  misc_feature 1..30: note = Synthetic construct
  source 1..30: mol_type = other DNA
caacattatgttaactggcctccgtggacg

SEQ ID NO: 11955 - DNA, 27 bp, synthetic construct
  misc_feature 1..27: note = Synthetic construct
  source 1..27: mol_type = other DNA
ctacaacataatagttaccctctcact

SEQ ID NO: 11956 - DNA, 27 bp, synthetic construct
  misc_feature 1..27: note = Synthetic construct
  source 1..27: mol_type = other DNA
atgcaggctctacagactcctcccacc

SEQ ID NO: 11957 - DNA, 27 bp, synthetic construct
  misc_feature 1..27: note = Synthetic construct
  source 1..27: mol_type = other DNA
caacagagttacagcacccccttcact

SEQ ID NO: 11958 - DNA, 33 bp, synthetic construct
  misc_feature 1..33: note = Synthetic construct
  source 1..33: mol_type = other DNA
tattcccgtgccggtactggtgaccatgtggtg

SEQ ID NO: 11959 - DNA, 30 bp, synthetic construct
  misc_feature 1..30: note = Synthetic construct
  source 1..30: mol_type = other DNA
cagcagcgtagcgactggccgcctctcact

SEQ ID NO: 11960 - DNA, 27 bp, synthetic construct
  misc_feature 1..27: note = Synthetic construct
  source 1..27: mol_type = other DNA
cagcagtataatgactggccgtggacg

SEQ ID NO: 11961 - DNA, 27 bp, synthetic construct
  misc_feature 1..27: note = Synthetic construct
  source 1..27: mol_type = other DNA
caaaagtataacagtgccccgctcact

SEQ ID NO: 11962 - DNA, 27 bp, synthetic construct
  misc_feature 1..27: note = Synthetic construct
  source 1..27: mol_type = other DNA
caaaactataacagtgccccattcact

SEQ ID NO: 11963 - DNA, 33 bp, synthetic construct
  misc_feature 1..33: note = Synthetic construct
  source 1..33: mol_type = other DNA
aactcccgggacaccagtggtaaccgttgggtg

SEQ ID NO: 11964 - DNA, 27 bp, synthetic construct
  misc_feature 1..27: note = Synthetic construct
  source 1..27: mol_type = other DNA
cagcagtataatgactggctgatcacg

SEQ ID NO: 11965 - DNA, 33 bp, synthetic construct
  misc_feature 1..33: note = Synthetic construct
  source 1..33: mol_type = other DNA
gcatcatgggatgacagcctgaatggttggggg

SEQ ID NO: 11966 - DNA, 30 bp, synthetic construct
  misc_feature 1..30: note = Synthetic construct
  source 1..30: mol_type = other DNA
caggtgtgggatagtagtactgatcatcta

SEQ ID NO: 11967 - DNA, 33 bp, synthetic construct
  misc_feature 1..33: note = Synthetic construct
  source 1..33: mol_type = other DNA
gcagtttgggatgacaacctgagggcttgggtg

SEQ ID NO: 11968 - DNA, 27 bp, synthetic construct
  misc_feature 1..27: note = Synthetic construct
  source 1..27: mol_type = other DNA
caaaagtataacagtgccccattcact

SEQ ID NO: 11969 - DNA, 27 bp, synthetic construct
  misc_feature 1..27: note = Synthetic construct
  source 1..27: mol_type = other DNA
caacagtataatacttattcgtacact

SEQ ID NO: 11970 - DNA, 27 bp, synthetic construct
  misc_feature 1..27: note = Synthetic construct
  source 1..27: mol_type = other DNA
caacagtataaaagttattcgtggacg

SEQ ID NO: 11971 - DNA, 33 bp, synthetic construct
  misc_feature 1..33: note = Synthetic construct
  source 1..33: mol_type = other DNA
cagatttgggatattgacagtgatcattgggtg

SEQ ID NO: 11972 - DNA, 30 bp, synthetic construct
  misc_feature 1..30: note = Synthetic construct
  source 1..30: mol_type = other DNA
tgctcatatgcaggcagttacacttttctc

SEQ ID NO: 11973 - DNA, 30 bp, synthetic construct
  misc_feature 1..30: note = Synthetic construct
  source 1..30: mol_type = other DNA
caggtgtggaatagtattagtgattatgtc

SEQ ID NO: 11974 - DNA, 33 bp, synthetic construct
  misc_feature 1..33: note = Synthetic construct
  source 1..33: mol_type = other DNA
cagtcctatgacagcagcctgagtgccgtggta

SEQ ID NO: 11975 - DNA, 27 bp, synthetic construct
  misc_feature 1..27: note = Synthetic construct
  source 1..27: mol_type = other DNA
cagacctggggcactggcattcaggtg

SEQ ID NO: 11976 - DNA, 27 bp, synthetic construct
  misc_feature 1..27: note = Synthetic construct
  source 1..27: mol_type = other DNA
caacagtattatagttaccctccgacg

SEQ ID NO: 11977 - DNA, 33 bp, synthetic construct
  misc_feature 1..33: note = Synthetic construct
  source 1..33: mol_type = other DNA
caatcagcagacagcagtggtacttatcgggta

SEQ ID NO: 11978 - DNA, 27 bp, synthetic construct
  misc_feature 1..27: note = Synthetic construct
  source 1..27: mol_type = other DNA
cagcaatattatagtactcttcggacg

SEQ ID NO: 11979 - DNA, 27 bp, synthetic construct
  misc_feature 1..27: note = Synthetic construct
  source 1..27: mol_type = other DNA
ttgctctcctatagtggtgcttgggtg

SEQ ID NO: 11980 - DNA, 27 bp, synthetic construct
  misc_feature 1..27: note = Synthetic construct
  source 1..27: mol_type = other DNA
caacagacttacagtgccccgtacact

SEQ ID NO: 11981 - DNA, 33 bp, synthetic construct
  misc_feature 1..33: note = Synthetic construct
  source 1..33: mol_type = other DNA
caatcagcagacagcagtggtctttattatgtc

SEQ ID NO: 11982 - DNA, 30 bp, synthetic construct
  misc_feature 1..30: note = Synthetic construct
  source 1..30: mol_type = other DNA
caacagagttacagtacccccctgtacact

SEQ ID NO: 11983 - DNA, 27 bp, synthetic construct
  misc_feature 1..27: note = Synthetic construct
  source 1..27: mol_type = other DNA
ctacaagattacaattaccctcgaacg

SEQ ID NO: 11984 - DNA, 27 bp, synthetic construct
  misc_feature 1..27: note = Synthetic construct
  source 1..27: mol_type = other DNA
cagcagcgtagcaactggccggagact

SEQ ID NO: 11985 - DNA, 30 bp, synthetic construct
  misc_feature 1..30: note = Synthetic construct
  source 1..30: mol_type = other DNA
cagcagcgtagcaactggcctccgatcacc

SEQ ID NO: 11986 - DNA, 33 bp, synthetic construct
  misc_feature 1..33: note = Synthetic construct
  source 1..33: mol_type = other DNA
aactcccgggacagcagtggcaagcatctgcta

SEQ ID NO: 11987 - DNA, 27 bp, synthetic construct
  misc_feature 1..27: note = Synthetic construct
  source 1..27: mol_type = other DNA
cagtcttatgatagtacttatagggtg

SEQ ID NO: 11988 - DNA, 36 bp, synthetic construct
  misc_feature 1..36: note = Synthetic construct
  source 1..36: mol_type = other DNA
aattcccgggacatgagtggtaaccatctgggggtc

SEQ ID NO: 11989 - DNA, 27 bp, synthetic construct
  misc_feature 1..27: note = Synthetic construct
  source 1..27: mol_type = other DNA
caacagtataatagttattctcagacg

SEQ ID NO: 11990 - DNA, 36 bp, synthetic construct
  misc_feature 1..36: note = Synthetic construct
  source 1..36: mol_type = other DNA
caggtgtgggatagtagtagtgatcatccgggggta

SEQ ID NO: 11991 - DNA, 27 bp, synthetic construct
  misc_feature 1..27: note = Synthetic construct
  source 1..27: mol_type = other DNA
caacagtataatagttattctcggacg

SEQ ID NO: 11992 - DNA, 33 bp, synthetic construct
  misc_feature 1..33: note = Synthetic construct
  source 1..33: mol_type = other DNA
caggcgtgggacagcagcactgccctttatgtc

SEQ ID NO: 11993 - DNA, 27 bp, synthetic construct
  misc_feature 1..27: note = Synthetic construct
  source 1..27: mol_type = other DNA
caacagtattatagttacccgctcact

SEQ ID NO: 11994 - DNA, 27 bp, synthetic construct
  misc_feature 1..27: note = Synthetic construct
  source 1..27: mol_type = other DNA
cagcagtataataactggcctccgacg

SEQ ID NO: 11995 - DNA, 30 bp, synthetic construct
  misc_feature 1..30: note = Synthetic construct
  source 1..30: mol_type = other DNA
cagcagtataataactggcctccgtacact

SEQ ID NO: 11996 - DNA, 33 bp, synthetic construct
  misc_feature 1..33: note = Synthetic construct
  source 1..33: mol_type = other DNA
aactcccgggacagcagtggtaaccattatgtc

SEQ ID NO: 11997 - DNA, 27 bp, synthetic construct
  misc_feature 1..27: note = Synthetic construct
  source 1..27: mol_type = other DNA
caacagtataatagttatctattcact

SEQ ID NO: 11998 - DNA, 27 bp, synthetic construct
  misc_feature 1..27: note = Synthetic construct
  source 1..27: mol_type = other DNA
caacaggccaacagtttcccgctctct

SEQ ID NO: 11999 - DNA, 27 bp, synthetic construct
  misc_feature 1..27: note = Synthetic construct
  source 1..27: mol_type = other DNA
cagcaccgcagcacctggcctccgacg

SEQ ID NO: 12000 - DNA, 15 bp, synthetic construct
  misc_feature 1..15: note = Synthetic construct
  source 1..15: mol_type = other DNA
caacaccttaggacg

SEQ ID NO: 12001 - DNA, 30 bp, synthetic construct
  misc_feature 1..30: note = Synthetic construct
  source 1..30: mol_type = other DNA
tgctcatatgcaggtagtagtacttatgtc

SEQ ID NO: 12002 - DNA, 27 bp, synthetic construct
  misc_feature 1..27: note = Synthetic construct
  source 1..27: mol_type = other DNA
cagcaatatcatagctggccgggcact

SEQ ID NO: 12003 - DNA, 27 bp, synthetic construct
  misc_feature 1..27: note = Synthetic construct
  source 1..27: mol_type = other DNA
catcaatataatagttatccgacaaca

SEQ ID NO: 12004 - DNA, 27 bp, synthetic construct
  misc_feature 1..27: note = Synthetic construct
  source 1..27: mol_type = other DNA
caacactatgataattatccgtggacg

SEQ ID NO: 12005 - DNA, 33 bp, synthetic construct
  misc_feature 1..33: note = Synthetic construct
  source 1..33: mol_type = other DNA
caggtgtgggataacaatagtgaacatgaagtc

SEQ ID NO: 12006 - DNA, 30 bp, synthetic construct
  misc_feature 1..30: note = Synthetic construct
  source 1..30: mol_type = other DNA
caacaatatgatagtcgttttccgtacact

SEQ ID NO: 12007 - DNA, 33 bp, synthetic construct
  misc_feature 1..33: note = Synthetic construct
  source 1..33: mol_type = other DNA
gcagcatgggatgacagcctgaatggtccggtc

SEQ ID NO: 12008 - DNA, 33 bp, synthetic construct
  misc_feature 1..33: note = Synthetic construct
  source 1..33: mol_type = other DNA
cagttgtataataactggcctcggagaatcact

SEQ ID NO: 12009 - DNA, 24 bp, synthetic construct
  misc_feature 1..24: note = Synthetic construct
  source 1..24: mol_type = other DNA
caacattataatacttatagggcg

SEQ ID NO: 12010 - DNA, 27 bp, synthetic construct
  misc_feature 1..27: note = Synthetic construct
  source 1..27: mol_type = other DNA
cagcaatactatactactccgtacact

SEQ ID NO: 12011 - DNA, 33 bp, synthetic construct
  misc_feature 1..33: note = Synthetic construct
  source 1..33: mol_type = other DNA
tgcgcaatggacgtcaggagtcaccaggtgaaa

SEQ ID NO: 12012 - DNA, 27 bp, synthetic construct
  misc_feature 1..27: note = Synthetic construct
  source 1..27: mol_type = other DNA
caacagtataatagttatctgtggacg

SEQ ID NO: 12013 - DNA, 30 bp, synthetic construct
  misc_feature 1..30: note = Synthetic construct
  source 1..30: mol_type = other DNA
agctcatatacaagcagcagcactcgggtc

SEQ ID NO: 12014 - DNA, 36 bp, synthetic construct
  misc_feature 1..36: note = Synthetic construct
  source 1..36: mol_type = other DNA
aactcctgggacaccagtggtaactatcccgtgata

SEQ ID NO: 12015 - DNA, 24 bp, synthetic construct
  misc_feature 1..24: note = Synthetic construct
  source 1..24: mol_type = other DNA
caccaatatgacaccatgtacact

SEQ ID NO: 12016 - DNA, 36 bp, synthetic construct
  misc_feature 1..36: note = Synthetic construct
  source 1..36: mol_type = other DNA
cagtcctatgacagcagcctgagtgtcttttatgtc

SEQ ID NO: 12017 - DNA, 33 bp, synthetic construct
  misc_feature 1..33: note = Synthetic construct
  source 1..33: mol_type = other DNA
caggtgtgggatagtactggcgatcatgtggtc

SEQ ID NO: 12018 - DNA, 27 bp, synthetic construct
  misc_feature 1..27: note = Synthetic construct
  source 1..27: mol_type = other DNA
cagcagcgtggcgactggcctccgacc

SEQ ID NO: 12019 - DNA, 36 bp, synthetic construct
  misc_feature 1..36: note = Synthetic construct
  source 1..36: mol_type = other DNA
agctcatatacaagcagcagcactctcgatgtggta

SEQ ID NO: 12020 - DNA, 27 bp, synthetic construct
  misc_feature 1..27: note = Synthetic construct
  source 1..27: mol_type = other DNA
agctcatatgcaggcagctctgtggta

SEQ ID NO: 12021 - DNA, 24 bp, synthetic construct
  misc_feature 1..24: note = Synthetic construct
  source 1..24: mol_type = other DNA
cagcagtatggtagctcactcact

SEQ ID NO: 12022 - DNA, 24 bp, synthetic construct
  misc_feature 1..24: note = Synthetic construct
  source 1..24: mol_type = other DNA
cagcagtataataactggcctcgt

SEQ ID NO: 12023 - DNA, 27 bp, synthetic construct
  misc_feature 1..27: note = Synthetic construct
  source 1..27: mol_type = other DNA
caacagtataataactggcctcgaacg

SEQ ID NO: 12024 - DNA, 33 bp, synthetic construct
  misc_feature 1..33: note = Synthetic construct
  source 1..33: mol_type = other DNA
ggaacatatgatcgcagcctgagtgcttgggtg

SEQ ID NO: 12025 - DNA, 33 bp, synthetic construct
  misc_feature 1..33: note = Synthetic construct
  source 1..33: mol_type = other DNA
ggaacatgggatgccgaattgagagcgagggtg

SEQ ID NO: 12026 - DNA, 39 bp, synthetic construct
  misc_feature 1..39: note = Synthetic construct
  source 1..39: mol_type = other DNA
caggtgtgggatagcagtagtgatcctccgtgtgtggtg

SEQ ID NO: 12027 - DNA, 27 bp, synthetic construct
  misc_feature 1..27: note = Synthetic construct
  source 1..27: mol_type = other DNA
caacagagttacaatatcccgtacacc

SEQ ID NO: 12028 - DNA, 30 bp, synthetic construct
  misc_feature 1..30: note = Synthetic construct
  source 1..30: mol_type = other DNA
caacactatgcttactcaccaccgtggacg

SEQ ID NO: 12029 - DNA, 21 bp, synthetic construct
  misc_feature 1..21: note = Synthetic construct
  source 1..21: mol_type = other DNA
caacagtataatagttacact

SEQ ID NO: 12030 - DNA, 30 bp, synthetic construct
  misc_feature 1..30: note = Synthetic construct
  source 1..30: mol_type = other DNA
agctcatatacaaccaggattccttgtgtc

SEQ ID NO: 12031 - DNA, 27 bp, synthetic construct
  misc_feature 1..27: note = Synthetic construct
  source 1..27: mol_type = other DNA
gagacctgggacagttacactcaggtg

SEQ ID NO: 12032 - DNA, 27 bp, synthetic construct
  misc_feature 1..27: note = Synthetic construct
  source 1..27: mol_type = other DNA
cagcaatattttaattctcccatcacc

SEQ ID NO: 12033 - DNA, 27 bp, synthetic construct
  misc_feature 1..27: note = Synthetic construct
  source 1..27: mol_type = other DNA
caacaatataatagttacatgtacact

SEQ ID NO: 12034 - DNA, 27 bp, synthetic construct
  misc_feature 1..27: note = Synthetic construct
  source 1..27: mol_type = other DNA
caaaagtataaccgtgccccccacact

SEQ ID NO: 12035 - DNA, 27 bp, synthetic construct
  misc_feature 1..27: note = Synthetic construct
  source 1..27: mol_type = other DNA
caacagtataatagttattcgtggacg

SEQ ID NO: 12036 - DNA, 27 bp, synthetic construct
  misc_feature 1..27: note = Synthetic construct
  source 1..27: mol_type = other DNA
caacagtatgatagttatcctcgaacg

SEQ ID NO: 12037 - DNA, 27 bp, synthetic construct
  misc_feature 1..27: note = Synthetic construct
  source 1..27: mol_type = other DNA
caacaatataatatctatccggaaacg

SEQ ID NO: 12038 - DNA, 30 bp, synthetic construct
  misc_feature 1..30: note = Synthetic construct
  source 1..30: mol_type = other DNA
cagcaccgtagcaactggcctccgtacact

SEQ ID NO: 12039 - DNA, 30 bp, synthetic construct
  misc_feature 1..30: note = Synthetic construct
  source 1..30: mol_type = other DNA
ttactcgcctttggtggtgtccggtgggtg

SEQ ID NO: 12040 - DNA, 33 bp, synthetic construct
  misc_feature 1..33: note = Synthetic construct
  source 1..33: mol_type = other DNA
cagtcctatgacagccgcctgagtggttatgtc

SEQ ID NO: 12041 - DNA, 24 bp, synthetic construct
  misc_feature 1..24: note = Synthetic construct
  source 1..24: mol_type = other DNA
caacagtatgataatctgatcacc

SEQ ID NO: 12042 - DNA, 24 bp, synthetic construct
  misc_feature 1..24: note = Synthetic construct
  source 1..24: mol_type = other DNA
caacagtataatagttattcaact

SEQ ID NO: 12043 - DNA, 27 bp, synthetic construct
  misc_feature 1..27: note = Synthetic construct
  source 1..27: mol_type = other DNA
caacaatataatagtgtcttatacact

SEQ ID NO: 12044 - DNA, 27 bp, synthetic construct
  misc_feature 1..27: note = Synthetic construct
  source 1..27: mol_type = other DNA
atgcaaggtgcgcagtggcccccgacg

SEQ ID NO: 12045 - DNA, 27 bp, synthetic construct
  misc_feature 1..27: note = Synthetic construct
  source 1..27: mol_type = other DNA
caccagtatggcagttcgcgtcagacg

SEQ ID NO: 12046 - DNA, 33 bp, synthetic construct
  misc_feature 1..33: note = Synthetic construct
  source 1..33: mol_type = other DNA
tcctcatattcgcgcagcagcgattcttatgtc

SEQ ID NO: 12047 - DNA, 30 bp, synthetic construct
  misc_feature 1..30: note = Synthetic construct
  source 1..30: mol_type = other DNA
cagcaatattataccagtcctccgtatact

SEQ ID NO: 12048 - DNA, 24 bp, synthetic construct
  misc_feature 1..24: note = Synthetic construct
  source 1..24: mol_type = other DNA
caacaatatcaaagttattcttct

SEQ ID NO: 12049 - DNA, 27 bp, synthetic construct
  misc_feature 1..27: note = Synthetic construct
  source 1..27: mol_type = other DNA
catcaatattatgactggccgtggacg

SEQ ID NO: 12050 - DNA, 30 bp, synthetic construct
  misc_feature 1..30: note = Synthetic construct
  source 1..30: mol_type = other DNA
cagcactataataagtggccccctttcact

SEQ ID NO: 12051 - DNA, 30 bp, synthetic construct
  misc_feature 1..30: note = Synthetic construct
  source 1..30: mol_type = other DNA
agctcatatacaaccagcaacactctggta

SEQ ID NO: 12052 - DNA, 30 bp, synthetic construct
  misc_feature 1..30: note = Synthetic construct
  source 1..30: mol_type = other DNA
cagcagtataataactggcctccgttcact

SEQ ID NO: 12053 - DNA, 30 bp, synthetic construct
  misc_feature 1..30: note = Synthetic construct
  source 1..30: mol_type = other DNA
caacagagttacagtacccctcggatcact

SEQ ID NO: 12054 - DNA, 30 bp, synthetic construct
  misc_feature 1..30: note = Synthetic construct
  source 1..30: mol_type = other DNA
caacagtattatagtacccctccgctcact

SEQ ID NO: 12055 - DNA, 27 bp, synthetic construct
  misc_feature 1..27: note = Synthetic construct
  source 1..27: mol_type = other DNA
caacagagttacttgaacaggtggacg

SEQ ID NO: 12056 - DNA, 33 bp, synthetic construct
  misc_feature 1..33: note = Synthetic construct
  source 1..33: mol_type = other DNA
tattcaacagacagcagtggtactcatagggta

SEQ ID NO: 12057 - DNA, 30 bp, synthetic construct
  misc_feature 1..30: note = Synthetic construct
  source 1..30: mol_type = other DNA
caacaatatgaaattctgcctcggttcact

SEQ ID NO: 12058 - DNA, 27 bp, synthetic construct
  misc_feature 1..27: note = Synthetic construct
  source 1..27: mol_type = other DNA
caacagtataatagttaccctttcact

SEQ ID NO: 12059 - DNA, 30 bp, synthetic construct
  misc_feature 1..30: note = Synthetic construct
  source 1..30: mol_type = other DNA
cagcagtataagaactggcctccgaacact

SEQ ID NO: 12060 - DNA, 27 bp, synthetic construct
  misc_feature 1..27: note = Synthetic construct
  source 1..27: mol_type = other DNA
cagcagtatggtaactcacagatcacg

SEQ ID NO: 12061 - DNA, 27 bp, synthetic construct
  misc_feature 1..27: note = Synthetic construct
  source 1..27: mol_type = other DNA
catcagagttatactttagcgaacact

SEQ ID NO: 12062 - DNA, 27 bp, synthetic construct
  misc_feature 1..27: note = Synthetic construct
  source 1..27: mol_type = other DNA
caacaggctaacagtttcccaatcacc

SEQ ID NO: 12063 - DNA, 33 bp, synthetic construct
  misc_feature 1..33: note = Synthetic construct
  source 1..33: mol_type = other DNA
caacagagttacagtgcccctccggtgtacagt

SEQ ID NO: 12064 - DNA, 27 bp, synthetic construct
  misc_feature 1..27: note = Synthetic construct
  source 1..27: mol_type = other DNA
cagcagtatggtacctcacctctgacg

SEQ ID NO: 12065 - DNA, 27 bp, synthetic construct
  misc_feature 1..27: note = Synthetic construct
  source 1..27: mol_type = other DNA
cagcaatattttggtactcctctcact

SEQ ID NO: 12066 - DNA, 24 bp, synthetic construct
  misc_feature 1..24: note = Synthetic construct
  source 1..24: mol_type = other DNA
caacagtataatagttatccgacg

SEQ ID NO: 12067 - DNA, 30 bp, synthetic construct
  misc_feature 1..30: note = Synthetic construct
  source 1..30: mol_type = other DNA
tgctcatatgcaggtagtagcactttcgtc

SEQ ID NO: 12068 - DNA, 27 bp, synthetic construct
  misc_feature 1..27: note = Synthetic construct
  source 1..27: mol_type = other DNA
ctacagcataatagttatccgtggacg

SEQ ID NO: 12069 - DNA, 27 bp, synthetic construct
  misc_feature 1..27: note = Synthetic construct
  source 1..27: mol_type = other DNA
caggcgtgggacacaagcgctgcgatt

SEQ ID NO: 12070 - DNA, 30 bp, synthetic construct
  misc_feature 1..30: note = Synthetic construct
  source 1..30: mol_type = other DNA
aactcccgttacagcagtgcttaccaggtg

SEQ ID NO: 12071 - DNA, 27 bp, synthetic construct
  misc_feature 1..27: note = Synthetic construct
  source 1..27: mol_type = other DNA
cagcagtgtgataatctccctttcact

SEQ ID NO: 12072 - DNA, 27 bp, synthetic construct
  misc_feature 1..27: note = Synthetic construct
  source 1..27: mol_type = other DNA
caacaatataatagtttcccgtacact

SEQ ID NO: 12073 - DNA, 27 bp, synthetic construct
  misc_feature 1..27: note = Synthetic construct
  source 1..27: mol_type = other DNA
atgcaagatgcacaggatctgtggacg

SEQ ID NO: 12074 - DNA, 30 bp, synthetic construct
  misc_feature 1..30: note = Synthetic construct
  source 1..30: mol_type = other DNA
cagcaatattatagtactcttccgtcgacg

SEQ ID NO: 12075 - DNA, 27 bp, synthetic construct
  misc_feature 1..27: note = Synthetic construct
  source 1..27: mol_type = other DNA
cagtcttacgatagcatctcttgggtg

SEQ ID NO: 12076 - DNA, 27 bp, synthetic construct
  misc_feature 1..27: note = Synthetic construct
  source 1..27: mol_type = other DNA
atgcaaggtacacactggccccggacg

SEQ ID NO: 12077 - DNA, 33 bp, synthetic construct
  misc_feature 1..33: note = Synthetic construct
  source 1..33: mol_type = other DNA
ggcacatgggatagcagcctgggaggtgtggtc

SEQ ID NO: 12078 - DNA, 30 bp, synthetic construct
  misc_feature 1..30: note = Synthetic construct
  source 1..30: mol_type = other DNA
cagcagcgtagcaactggcctccgctcact

SEQ ID NO: 12079 - DNA, 27 bp, synthetic construct
  misc_feature 1..27: note = Synthetic construct
  source 1..27: mol_type = other DNA
cagacctggggcactggcattcatgtc

SEQ ID NO: 12080 - DNA, 30 bp, synthetic construct
  misc_feature 1..30: note = Synthetic construct
  source 1..30: mol_type = other DNA
agctcatatacaagcagcagcactcaggtc

SEQ ID NO: 12081 - DNA, 27 bp, synthetic construct
  misc_feature 1..27: note = Synthetic construct
  source 1..27: mol_type = other DNA
caacagtattatagttacccattcact

SEQ ID NO: 12082 - DNA, 33 bp, synthetic construct
  misc_feature 1..33: note = Synthetic construct
  source 1..33: mol_type = other DNA
acctcatatacaaacaacaccaattctcaggta

SEQ ID NO: 12083 - DNA, 27 bp, synthetic construct
  misc_feature 1..27: note = Synthetic construct
  source 1..27: mol_type = other DNA
caacagagttacagtaccccccggacg

SEQ ID NO: 12084 - DNA, 30 bp, synthetic construct
  misc_feature 1..30: note = Synthetic construct
  source 1..30: mol_type = other DNA
caacagtataatagttattccctggggact

SEQ ID NO: 12085 - DNA, 30 bp, synthetic construct
  misc_feature 1..30: note = Synthetic construct
  source 1..30: mol_type = other DNA
tgctcatatgcaggtaataatatcccgcta

SEQ ID NO: 12086 - DNA, 30 bp, synthetic construct
  misc_feature 1..30: note = Synthetic construct
  source 1..30: mol_type = other DNA
atgcaaggtacacactggcctccgctcact

SEQ ID NO: 12087 - DNA, 30 bp, synthetic construct
  misc_feature 1..30: note = Synthetic construct
  source 1..30: mol_type = other DNA
cagtcctatgacagcagcctgagtggagtc

SEQ ID NO: 12088 - DNA, 27 bp, synthetic construct
  misc_feature 1..27: note = Synthetic construct
  source 1..27: mol_type = other DNA
cagcaatattatagtacttcgtacact

SEQ ID NO: 12089 - DNA, 30 bp, synthetic construct
  misc_feature 1..30: note = Synthetic construct
  source 1..30: mol_type = other DNA
agctcatatacaatccgcagcacccatgtc

SEQ ID NO: 12090 - DNA, 27 bp, synthetic construct
  misc_feature 1..27: note = Synthetic construct
  source 1..27: mol_type = other DNA
cagcaatatggtagccctccgtggacg

SEQ ID NO: 12091 - DNA, 27 bp, synthetic construct
  misc_feature 1..27: note = Synthetic construct
  source 1..27: mol_type = other DNA
caacagtatgatagttatccggaaacg

SEQ ID NO: 12092 - DNA, 27 bp, synthetic construct
  misc_feature 1..27: note = Synthetic construct
  source 1..27: mol_type = other DNA
cagacctggggcactggcccttgggtg

SEQ ID NO: 12093 - DNA, 27 bp, synthetic construct
  misc_feature 1..27: note = Synthetic construct
  source 1..27: mol_type = other DNA
cagcagcgtagcaactggcctctcact

SEQ ID NO: 12094 - DNA, 27 bp, synthetic construct
  misc_feature 1..27: note = Synthetic construct
  source 1..27: mol_type = other DNA
catcagagtagtagtttacctttcact

SEQ ID NO: 12095 - DNA, 27 bp, synthetic construct
  misc_feature 1..27: note = Synthetic construct
  source 1..27: mol_type = other DNA
cagcagtatcataactcactggacact

SEQ ID NO: 12096 - DNA, 27 bp, synthetic construct
  misc_feature 1..27: note = Synthetic construct
  source 1..27: mol_type = other DNA
cagcaatattatactactccgtggacg

SEQ ID NO: 12097 - DNA, 33 bp, synthetic construct
  misc_feature 1..33: note = Synthetic construct
  source 1..33: mol_type = other DNA
cagcagtatggtagctcacctccggcattcact

SEQ ID NO: 12098 - DNA, 30 bp, synthetic construct
  misc_feature 1..30: note = Synthetic construct
  source 1..30: mol_type = other DNA
gtgctctttgtgggtggtggcatttggcta

SEQ ID NO: 12099 - DNA, 27 bp, synthetic construct
  misc_feature 1..27: note = Synthetic construct
  source 1..27: mol_type = other DNA
atgcagggtgcacactggccgtacact

SEQ ID NO: 12100 - DNA, 30 bp, synthetic construct
  misc_feature 1..30: note = Synthetic construct
  source 1..30: mol_type = other DNA
gtgctttatatgactagtggcattgtgcta

SEQ ID NO: 12101 - DNA, 27 bp, synthetic construct
  misc_feature 1..27: note = Synthetic construct
  source 1..27: mol_type = other DNA
tactctgcggctgacaacaatctggta

SEQ ID NO: 12102 - DNA, 27 bp, synthetic construct
  misc_feature 1..27: note = Synthetic construct
  source 1..27: mol_type = other DNA
atgcaagctctacaaactcctttcact

SEQ ID NO: 12103 - DNA, 27 bp, synthetic construct
  misc_feature 1..27: note = Synthetic construct
  source 1..27: mol_type = other DNA
atgcaagctctacaaactccttgggct

SEQ ID NO: 12104 - DNA, 27 bp, synthetic construct
  misc_feature 1..27: note = Synthetic construct
  source 1..27: mol_type = other DNA
caacagtatgatgatctccctctcact

SEQ ID NO: 12105 - DNA, 27 bp, synthetic construct
  misc_feature 1..27: note = Synthetic construct
  source 1..27: mol_type = other DNA
caacagtatgataatatccctctgacg

SEQ ID NO: 12106 - DNA, 27 bp, synthetic construct
  misc_feature 1..27: note = Synthetic construct
  source 1..27: mol_type = other DNA
cgacagacttacagtaccccgtacact

SEQ ID NO: 12107 - DNA, 27 bp, synthetic construct
  misc_feature 1..27: note = Synthetic construct
  source 1..27: mol_type = other DNA
cagcagcgtatcaactggccgctcacc

SEQ ID NO: 12108 - DNA, 27 bp, synthetic construct
  misc_feature 1..27: note = Synthetic construct
  source 1..27: mol_type = other DNA
caacagagttacagtacccctccaagt

SEQ ID NO: 12109 - DNA, 27 bp, synthetic construct
  misc_feature 1..27: note = Synthetic construct
  source 1..27: mol_type = other DNA
atgcagggcacacactggccttggacg

SEQ ID NO: 12110 - DNA, 33 bp, synthetic construct
  misc_feature 1..33: note = Synthetic construct
  source 1..33: mol_type = other DNA
caggtctgggattttaatagtgatcatgcactg

SEQ ID NO: 12111 - DNA, 30 bp, synthetic construct
  misc_feature 1..30: note = Synthetic construct
  source 1..30: mol_type = other DNA
cagtcttatgataacaattttgattgggtt

SEQ ID NO: 12112 - DNA, 18 bp, synthetic construct
  misc_feature 1..18: note = Synthetic construct
  source 1..18: mol_type = other DNA
caataccccccgaggacg

SEQ ID NO: 12113 - DNA, 30 bp, synthetic construct
  misc_feature 1..30: note = Synthetic construct
  source 1..30: mol_type = other DNA
cagcactataacattgggcacggccacact

SEQ ID NO: 12114 - DNA, 27 bp, synthetic construct
  misc_feature 1..27: note = Synthetic construct
  source 1..27: mol_type = other DNA
cagcaatattatagtgccccgtggacg

SEQ ID NO: 12115 - DNA, 36 bp, synthetic construct
  misc_feature 1..36: note = Synthetic construct
  source 1..36: mol_type = other DNA
caggtgtgggacattagtgatgagcatccttatgtc

SEQ ID NO: 12116 - DNA, 27 bp, synthetic construct
  misc_feature 1..27: note = Synthetic construct
  source 1..27: mol_type = other DNA
caacagggttacagtaccccgttcacc

SEQ ID NO: 12117 - DNA, 27 bp, synthetic construct
  misc_feature 1..27: note = Synthetic construct
  source 1..27: mol_type = other DNA
cagtcttattatggcggcaatcaggtg

SEQ ID NO: 12118 - DNA, 33 bp, synthetic construct
  misc_feature 1..33: note = Synthetic construct
  source 1..33: mol_type = other DNA
ggtacatggcacagcaactctaagactcgagtg

SEQ ID NO: 12119 - DNA, 33 bp, synthetic construct
  misc_feature 1..33: note = Synthetic construct
  source 1..33: mol_type = other DNA
gcagcttgggatgacagcctgaatggtgtagtc

SEQ ID NO: 12120 - DNA, 30 bp, synthetic construct
  misc_feature 1..30: note = Synthetic construct
  source 1..30: mol_type = other DNA
caacagtattataatttcctccctctcact

SEQ ID NO: 12121 - DNA, 27 bp, synthetic construct
  misc_feature 1..27: note = Synthetic construct
  source 1..27: mol_type = other DNA
cagcagtatggtacctcactgttcact

SEQ ID NO: 12122 - DNA, 36 bp, synthetic construct
  misc_feature 1..36: note = Synthetic construct
  source 1..36: mol_type = other DNA
ggaacatgggatagcagcctgagtgcaccttgggtg

SEQ ID NO: 12123 - DNA, 27 bp, synthetic construct
  misc_feature 1..27: note = Synthetic construct
  source 1..27: mol_type = other DNA
ctgcaggctaacactatgcctctcact

SEQ ID NO: 12124 - DNA, 30 bp, synthetic construct
  misc_feature 1..30: note = Synthetic construct
  source 1..30: mol_type = other DNA
caacaatattatactacttctgctctcact

SEQ ID NO: 12125 - DNA, 30 bp, synthetic construct
  misc_feature 1..30: note = Synthetic construct
  source 1..30: mol_type = other DNA
cagtcttttgatagcacttctcactgggtg

SEQ ID NO: 12126 - DNA, 33 bp, synthetic construct
  misc_feature 1..33: note = Synthetic construct
  source 1..33: mol_type = other DNA
caagtttacgataggaatactgatcaatgggta

SEQ ID NO: 12127 - DNA, 33 bp, synthetic construct
  misc_feature 1..33: note = Synthetic construct
  source 1..33: mol_type = other DNA
aactcccgggacagcagtggtaaccatcaggtc

SEQ ID NO: 12128 - DNA, 27 bp, synthetic construct
  misc_feature 1..27: note = Synthetic construct
  source 1..27: mol_type = other DNA
caacagtatcatacttcttcggaaacc

SEQ ID NO: 12129 - DNA, 30 bp, synthetic construct
  misc_feature 1..30: note = Synthetic construct
  source 1..30: mol_type = other DNA
caacaatactatactttttcttcgtggacg

SEQ ID NO: 12130 - DNA, 24 bp, synthetic construct
  misc_feature 1..24: note = Synthetic construct
  source 1..24: mol_type = other DNA
caacagtatgataatttgtggtcg

SEQ ID NO: 12131 - DNA, 30 bp, synthetic construct
  misc_feature 1..30: note = Synthetic construct
  source 1..30: mol_type = other DNA
atgcaaggaacacactggcctccgtggacg

SEQ ID NO: 12132 - DNA, 30 bp, synthetic construct
  misc_feature 1..30: note = Synthetic construct
  source 1..30: mol_type = other DNA
caacagtataatacttattcggggtggacg

SEQ ID NO: 12133 - DNA, 27 bp, synthetic construct
  misc_feature 1..27: note = Synthetic construct
  source 1..27: mol_type = other DNA
ctacagtacaaaaattaccctcgcacg

SEQ ID NO: 12134 - DNA, 30 bp, synthetic construct
  misc_feature 1..30: note = Synthetic construct
  source 1..30: mol_type = other DNA
caatcagcggacagcagtggtacttgggtc

SEQ ID NO: 12135 - DNA, 33 bp, synthetic construct
  misc_feature 1..33: note = Synthetic construct
  source 1..33: mol_type = other DNA
cagtcgcatgacagcagcctgactaatttcatc

SEQ ID NO: 12136 - DNA, 24 bp, synthetic construct
  misc_feature 1..24: note = Synthetic construct
  source 1..24: mol_type = other DNA
cagcagcgtaccgactggtacact

SEQ ID NO: 12137 - DNA, 27 bp, synthetic construct
  misc_feature 1..27: note = Synthetic construct
  source 1..27: mol_type = other DNA
caacagacttacagtatcccattcact

SEQ ID NO: 12138 - DNA, 30 bp, synthetic construct
  misc_feature 1..30: note = Synthetic construct
  source 1..30: mol_type = other DNA
cagcagcgtgtcaactggccgtatctcact

SEQ ID NO: 12139 - DNA, 30 bp, synthetic construct
  misc_feature 1..30: note = Synthetic construct
  source 1..30: mol_type = other DNA
agctcatatacaagcagcagcacttttgtc

SEQ ID NO: 12140 - DNA, 27 bp, synthetic construct
  misc_feature 1..27: note = Synthetic construct
  source 1..27: mol_type = other DNA
caacaatatgaaagttacccgtacact

SEQ ID NO: 12141 - DNA, 27 bp, synthetic construct
  misc_feature 1..27: note = Synthetic construct
  source 1..27: mol_type = other DNA
atgcaagcttcacaatttcctctcact

SEQ ID NO: 12142 - DNA, 30 bp, synthetic construct
  misc_feature 1..30: note = Synthetic construct
  source 1..30: mol_type = other DNA
cagcagtatgataagtggcctccgtggacg

SEQ ID NO: 12143 - DNA, 30 bp, synthetic construct
  misc_feature 1..30: note = Synthetic construct
  source 1..30: mol_type = other DNA
agctcatatacaagcatcagcactgtggta

SEQ ID NO: 12144 - DNA, 30 bp, synthetic construct
  misc_feature 1..30: note = Synthetic construct
  source 1..30: mol_type = other DNA
caacagtataattattggcctccgtacact

SEQ ID NO: 12145 - DNA, 27 bp, synthetic construct
  misc_feature 1..27: note = Synthetic construct
  source 1..27: mol_type = other DNA
atgcaagctctacaaactccgtacact

SEQ ID NO: 12146 - DNA, 27 bp, synthetic construct
  misc_feature 1..27: note = Synthetic construct
  source 1..27: mol_type = other DNA
cagcagcgtagcagctggcctctcact

SEQ ID NO: 12147 - DNA, 30 bp, synthetic construct
  misc_feature 1..30: note = Synthetic construct
  source 1..30: mol_type = other DNA
aactcatatacaaacagcagcactctggtg

SEQ ID NO: 12148 - DNA, 33 bp, synthetic construct
  misc_feature 1..33: note = Synthetic construct
  source 1..33: mol_type = other DNA
ggaacatgggatagcagcctgagtgcttatgtc

SEQ ID NO: 12149 - DNA, 30 bp, synthetic construct
  misc_feature 1..30: note = Synthetic construct
  source 1..30: mol_type = other DNA
caacagagttacagtacccctcggagcacc

SEQ ID NO: 12150 - DNA, 24 bp, synthetic construct
  misc_feature 1..24: note = Synthetic construct
  source 1..24: mol_type = other DNA
cagcagcgtagcaactggcctctt

SEQ ID NO: 12151 - DNA, 33 bp, synthetic construct
  misc_feature 1..33: note = Synthetic construct
  source 1..33: mol_type = other DNA
caggcgtgggacagcagcactgccccttatgtc

SEQ ID NO: 12152 - DNA, 30 bp, synthetic construct
  misc_feature 1..30: note = Synthetic construct
  source 1..30: mol_type = other DNA
agctcatatacaagcagcagcacttgggtg

SEQ ID NO: 12153 - DNA, 27 bp, synthetic construct
  misc_feature 1..27: note = Synthetic construct
  source 1..27: mol_type = other DNA
caacagggtaccagtttccccttcact

SEQ ID NO: 12154 - DNA, 33 bp, synthetic construct
  misc_feature 1..33: note = Synthetic construct
  source 1..33: mol_type = other DNA
cagttgtgggatagtcgtagtgatcatgtggta

SEQ ID NO: 12155 - DNA, 18 bp, synthetic construct
  misc_feature 1..18: note = Synthetic construct
  source 1..18: mol_type = other DNA
cagcagcgtgacttcact

SEQ ID NO: 12156 - DNA, 27 bp, synthetic construct
  misc_feature 1..27: note = Synthetic construct
  source 1..27: mol_type = other DNA
caacaggttaatgcttaccccttcagt

SEQ ID NO: 12157 - DNA, 27 bp, synthetic construct
  misc_feature 1..27: note = Synthetic construct
  source 1..27: mol_type = other DNA
caccagtatgataactggcctctcact

SEQ ID NO: 12158 - DNA, 30 bp, synthetic construct
  misc_feature 1..30: note = Synthetic construct
  source 1..30: mol_type = other DNA
cagtcttgtgataacaacaatcatggagtc

SEQ ID NO: 12159 - DNA, 27 bp, synthetic construct
  misc_feature 1..27: note = Synthetic construct
  source 1..27: mol_type = other DNA
cagcagtattatgatgaccccctcact

SEQ ID NO: 12160 - DNA, 33 bp, synthetic construct
  misc_feature 1..33: note = Synthetic construct
  source 1..33: mol_type = other DNA
ggaacatgggatagcagcctgagtgctgaggtc

SEQ ID NO: 12161 - DNA, 27 bp, synthetic construct
  misc_feature 1..27: note = Synthetic construct
  source 1..27: mol_type = other DNA
cagcagtattacacttcccctctgact

SEQ ID NO: 12162 - DNA, 27 bp, synthetic construct
  misc_feature 1..27: note = Synthetic construct
  source 1..27: mol_type = other DNA
caggcgtgggacagcagcactgccgtt

SEQ ID NO: 12163 - DNA, 30 bp, synthetic construct
  misc_feature 1..30: note = Synthetic construct
  source 1..30: mol_type = other DNA
caacagtataatagttattttccttggacg

SEQ ID NO: 12164 - DNA, 27 bp, synthetic construct
  misc_feature 1..27: note = Synthetic construct
  source 1..27: mol_type = other DNA
caacagagttttagtaggcctccaact

SEQ ID NO: 12165 - DNA, 30 bp, synthetic construct
  misc_feature 1..30: note = Synthetic construct
  source 1..30: mol_type = other DNA
tgctcatatgcaggtagtagaacttctttc

SEQ ID NO: 12166 - DNA, 27 bp, synthetic construct
  misc_feature 1..27: note = Synthetic construct
  source 1..27: mol_type = other DNA
cagcagcgtggcaactggccgatcacc

SEQ ID NO: 12167 - DNA, 33 bp, synthetic construct
  misc_feature 1..33: note = Synthetic construct
  source 1..33: mol_type = other DNA
acctcatatacaaacaacagctattctcaggta

SEQ ID NO: 12168 - DNA, 27 bp, synthetic construct
  misc_feature 1..27: note = Synthetic construct
  source 1..27: mol_type = other DNA
caacagagttacagtgcccctcgtact

SEQ ID NO: 12169 - DNA, 36 bp, synthetic construct
  misc_feature 1..36: note = Synthetic construct
  source 1..36: mol_type = other DNA
ggaacatgggataacagcctgagtgctggctatgtc

SEQ ID NO: 12170 - DNA, 27 bp, synthetic construct
  misc_feature 1..27: note = Synthetic construct
  source 1..27: mol_type = other DNA
cagcaatattatactactcctctgacg

SEQ ID NO: 12171 - DNA, 30 bp, synthetic construct
  misc_feature 1..30: note = Synthetic construct
  source 1..30: mol_type = other DNA
atctcatatacaactagcagcacttgggtg

SEQ ID NO: 12172 - DNA, 27 bp, synthetic construct
  misc_feature 1..27: note = Synthetic construct
  source 1..27: mol_type = other DNA
caaacgtgggacagcaccactgcggtg

SEQ ID NO: 12173 - DNA, 27 bp, synthetic construct
  misc_feature 1..27: note = Synthetic construct
  source 1..27: mol_type = other DNA
atgcaaggttcacactggccattcact

SEQ ID NO: 12174 - DNA, 27 bp, synthetic construct
  misc_feature 1..27: note = Synthetic construct
  source 1..27: mol_type = other DNA
cagcaatattatagtactctgtacact

SEQ ID NO: 12175 - DNA, 27 bp, synthetic construct
  misc_feature 1..27: note = Synthetic construct
  source 1..27: mol_type = other DNA
cagcagcgtagcaactggccttggact

SEQ ID NO: 12176 - DNA, 24 bp, synthetic construct
  misc_feature 1..24: note = Synthetic construct
  source 1..24: mol_type = other DNA
cagcaatattatagttctatcacc

SEQ ID NO: 12177 - DNA, 33 bp, synthetic construct
  misc_feature 1..33: note = Synthetic construct
  source 1..33: mol_type = other DNA
caatcagcagacagcagtggtactttcgtggta

SEQ ID NO: 12178 - DNA, 27 bp, synthetic construct
  misc_feature 1..27: note = Synthetic construct
  source 1..27: mol_type = other DNA
cagcaatattatagtactccattcact

SEQ ID NO: 12179 - DNA, 27 bp, synthetic construct
  misc_feature 1..27: note = Synthetic construct
  source 1..27: mol_type = other DNA
cagcagtataataactggcccctcact

SEQ ID NO: 12180 - DNA, 27 bp, synthetic construct
  misc_feature 1..27: note = Synthetic construct
  source 1..27: mol_type = other DNA
caacagtatgataatctccctcaaact

SEQ ID NO: 12181 - DNA, 30 bp, synthetic construct
  misc_feature 1..30: note = Synthetic construct
  source 1..30: mol_type = other DNA
caatcagcagacagcagtggtacttatgtc

SEQ ID NO: 12182 - DNA, 30 bp, synthetic construct
  misc_feature 1..30: note = Synthetic construct
  source 1..30: mol_type = other DNA
caacagtatgataatctccctccgctcact

SEQ ID NO: 12183 - DNA, 27 bp, synthetic construct
  misc_feature 1..27: note = Synthetic construct
  source 1..27: mol_type = other DNA
caacagtatgataatctccctctcact

SEQ ID NO: 12184 - DNA, 30 bp, synthetic construct
  misc_feature 1..30: note = Synthetic construct
  source 1..30: mol_type = other DNA
cagcagtatgataactggcctccgatcacc

SEQ ID NO: 12185 - DNA, 27 bp, synthetic construct
  misc_feature 1..27: note = Synthetic construct
  source 1..27: mol_type = other DNA
gtgctgtatctgggtactgtcgtgctc

SEQ ID NO: 12186 - DNA, 24 bp, synthetic construct
  misc_feature 1..24: note = Synthetic construct
  source 1..24: mol_type = other DNA
caacaatatgatactctgtggacg

SEQ ID NO: 12187 - DNA, 27 bp, synthetic construct
  misc_feature 1..27: note = Synthetic construct
  source 1..27: mol_type = other DNA
caaaagtataacagtgccccgtacact

SEQ ID NO: 12188 - DNA, 27 bp, synthetic construct
  misc_feature 1..27: note = Synthetic construct
  source 1..27: mol_type = other DNA
ctgctctcctatagtgatactcgggtc

SEQ ID NO: 12189 - DNA, 24 bp, synthetic construct
  misc_feature 1..24: note = Synthetic construct
  source 1..24: mol_type = other DNA
cagcaatttcatacttcttggacg

SEQ ID NO: 12190 - DNA, 33 bp, synthetic construct
  misc_feature 1..33: note = Synthetic construct
  source 1..33: mol_type = other DNA
caatcagcagacagcagtggtacttattgggtg

SEQ ID NO: 12191 - DNA, 30 bp, synthetic construct
  misc_feature 1..30: note = Synthetic construct
  source 1..30: mol_type = other DNA
atgcaagatgcacaagatcctccgtacact

SEQ ID NO: 12192 - DNA, 27 bp, synthetic construct
  misc_feature 1..27: note = Synthetic construct
  source 1..27: mol_type = other DNA
caacagagttacagtagtcctcggacg

SEQ ID NO: 12193 - DNA, 27 bp, synthetic construct
  misc_feature 1..27: note = Synthetic construct
  source 1..27: mol_type = other DNA
caacaggccagcagtttcccattcact

SEQ ID NO: 12194 - DNA, 27 bp, synthetic construct
  misc_feature 1..27: note = Synthetic construct
  source 1..27: mol_type = other DNA
caacagagttacagtaccccattcact

SEQ ID NO: 12195 - DNA, 27 bp, synthetic construct
  misc_feature 1..27: note = Synthetic construct
  source 1..27: mol_type = other DNA
cagcagtattctagtactccattcact

SEQ ID NO: 12196 - DNA, 30 bp, synthetic construct
  misc_feature 1..30: note = Synthetic construct
  source 1..30: mol_type = other DNA
aactcatatgcaggcagcgacaattgggtg

SEQ ID NO: 12197 - DNA, 24 bp, synthetic construct
  misc_feature 1..24: note = Synthetic construct
  source 1..24: mol_type = other DNA
cagcagtatcatttctggccttcg

SEQ ID NO: 12198 - DNA, 33 bp, synthetic construct
  misc_feature 1..33: note = Synthetic construct
  source 1..33: mol_type = other DNA
gcagcatgggatgacagcctgagtggttgggtg

SEQ ID NO: 12199 - DNA, 27 bp, synthetic construct
  misc_feature 1..27: note = Synthetic construct
  source 1..27: mol_type = other DNA
atgcaagctctacaaacccagatcacc

SEQ ID NO: 12200 - DNA, 30 bp, synthetic construct
  misc_feature 1..30: note = Synthetic construct
  source 1..30: mol_type = other DNA
cagcagtatggtagctcaccgcagatcacc

SEQ ID NO: 12201 - DNA, 30 bp, synthetic construct
  misc_feature 1..30: note = Synthetic construct
  source 1..30: mol_type = other DNA
agctcatatgcaagcgacaccagtctggtg

SEQ ID NO: 12202 - DNA, 27 bp, synthetic construct
  misc_feature 1..27: note = Synthetic construct
  source 1..27: mol_type = other DNA
cagcagtatggtagctcactgtggacg

SEQ ID NO: 12203 - DNA, 27 bp, synthetic construct
  misc_feature 1..27: note = Synthetic construct
  source 1..27: mol_type = other DNA
cagcaatttaatctttatcccctcact

SEQ ID NO: 12204 - DNA, 33 bp, synthetic construct
  misc_feature 1..33: note = Synthetic construct
  source 1..33: mol_type = other DNA
aactcccgggacagcagtggtaaccatgtggta

SEQ ID NO: 12205 - DNA, 33 bp, synthetic construct
  misc_feature 1..33: note = Synthetic construct
  source 1..33: mol_type = other DNA
gcagcatgggatgacagcctgaatggtgtggta

SEQ ID NO: 12206 - DNA, 33 bp, synthetic construct
  misc_feature 1..33: note = Synthetic construct
  source 1..33: mol_type = other DNA
aactcatacacaagcaccaccactcttgtactt

SEQ ID NO: 12207 - DNA, 27 bp, synthetic construct
  misc_feature 1..27: note = Synthetic construct
  source 1..27: mol_type = other DNA
caccagtatggtgactcaccgtggacg

SEQ ID NO: 12208 - DNA, 27 bp, synthetic construct
  misc_feature 1..27: note = Synthetic construct
  source 1..27: mol_type = other DNA
caacagtataatgcttatccgatcacc

SEQ ID NO: 12209 - DNA, 33 bp, synthetic construct
  misc_feature 1..33: note = Synthetic construct
  source 1..33: mol_type = other DNA
caggtgtgggatactgcttctgatcattatgtc

SEQ ID NO: 12210 - DNA, 27 bp, synthetic construct
  misc_feature 1..27: note = Synthetic construct
  source 1..27: mol_type = other DNA
cagcagtataataactggccccggacg

SEQ ID NO: 12211 - DNA, 30 bp, synthetic construct
  misc_feature 1..30: note = Synthetic construct
  source 1..30: mol_type = other DNA
cagcagtacaataattggcctccttacact

SEQ ID NO: 12212 - DNA, 27 bp, synthetic construct
  misc_feature 1..27: note = Synthetic construct
  source 1..27: mol_type = other DNA
tgctcatatgcaggcgctacttatgtc

SEQ ID NO: 12213 - DNA, 27 bp, synthetic construct
  misc_feature 1..27: note = Synthetic construct
  source 1..27: mol_type = other DNA
cagcaatattatactactcccctcact

SEQ ID NO: 12214 - DNA, 33 bp, synthetic construct
  misc_feature 1..33: note = Synthetic construct
  source 1..33: mol_type = other DNA
caggtgtgggacagtattagtaatcaggtgatt

SEQ ID NO: 12215 - DNA, 30 bp, synthetic construct
  misc_feature 1..30: note = Synthetic construct
  source 1..30: mol_type = other DNA
cagcagtatcatgcgtggcccccgctcacc

SEQ ID NO: 12216 - DNA, 33 bp, synthetic construct
  misc_feature 1..33: note = Synthetic construct
  source 1..33: mol_type = other DNA
cagcagtacagtaagtggcctccggggttcact

SEQ ID NO: 12217 - DNA, 33 bp, synthetic construct
  misc_feature 1..33: note = Synthetic construct
  source 1..33: mol_type = other DNA
caacagcgaagcaactggcctccgagtctcact

SEQ ID NO: 12218 - DNA, 24 bp, synthetic construct
  misc_feature 1..24: note = Synthetic construct
  source 1..24: mol_type = other DNA
cagcagtacaatagagggtggacg

SEQ ID NO: 12219 - DNA, 27 bp, synthetic construct
  misc_feature 1..27: note = Synthetic construct
  source 1..27: mol_type = other DNA
caacagagttacaatatacccctcact

SEQ ID NO: 12220 - DNA, 33 bp, synthetic construct
  misc_feature 1..33: note = Synthetic construct
  source 1..33: mol_type = other DNA
ggaacatgggatagcagcctgagtgctggactc

SEQ ID NO: 12221 - DNA, 24 bp, synthetic construct
  misc_feature 1..24: note = Synthetic construct
  source 1..24: mol_type = other DNA
caacagagttacaatgtcccgacg

SEQ ID NO: 12222 - DNA, 27 bp, synthetic construct
  misc_feature 1..27: note = Synthetic construct
  source 1..27: mol_type = other DNA
caacagtataatcattaccctttcacc

SEQ ID NO: 12223 - DNA, 27 bp, synthetic construct
  misc_feature 1..27: note = Synthetic construct
  source 1..27: mol_type = other DNA
caccagtattatagtactccgtccact

SEQ ID NO: 12224 - DNA, 27 bp, synthetic construct
  misc_feature 1..27: note = Synthetic construct
  source 1..27: mol_type = other DNA
caacagtttaatagttacacgtggacg

SEQ ID NO: 12225 - DNA, 30 bp, synthetic construct
  misc_feature 1..30: note = Synthetic construct
  source 1..30: mol_type = other DNA
caggcgtgggacagcagttccctttatgtc

SEQ ID NO: 12226 - DNA, 33 bp, synthetic construct
  misc_feature 1..33: note = Synthetic construct
  source 1..33: mol_type = other DNA
caacaggggaccgactggcctcacctattcact

SEQ ID NO: 12227 - DNA, 24 bp, synthetic construct
  misc_feature 1..24: note = Synthetic construct
  source 1..24: mol_type = other DNA
cagcagcatttcagctggatcacc

SEQ ID NO: 12228 - DNA, 27 bp, synthetic construct
  misc_feature 1..27: note = Synthetic construct
  source 1..27: mol_type = other DNA
atgcagggcacacactggccgctcact

SEQ ID NO: 12229 - DNA, 27 bp, synthetic construct
  misc_feature 1..27: note = Synthetic construct
  source 1..27: mol_type = other DNA
caacagagtttcagaaccccgtacact

SEQ ID NO: 12230 - DNA, 33 bp, synthetic construct
  misc_feature 1..33: note = Synthetic construct
  source 1..33: mol_type = other DNA
gccacatgggacgacagcctgactggctatgtc

SEQ ID NO: 12231 - DNA, 33 bp, synthetic construct
  misc_feature 1..33: note = Synthetic construct
  source 1..33: mol_type = other DNA
tcagcatgggacagcagcctcagtgcttgggtg

SEQ ID NO: 12232 - DNA, 27 bp, synthetic construct
  misc_feature 1..27: note = Synthetic construct
  source 1..27: mol_type = other DNA
caacagtatagtagttatccgttcacg

SEQ ID NO: 12233 - DNA, 33 bp, synthetic construct
  misc_feature 1..33: note = Synthetic construct
  source 1..33: mol_type = other DNA
tcttcatacataagaggcaccgcttcttttgtc

SEQ ID NO: 12234 - DNA, 30 bp, synthetic construct
  misc_feature 1..30: note = Synthetic construct
  source 1..30: mol_type = other DNA
cagcactatagtgactggcctccggtaact

SEQ ID NO: 12235 - DNA, 27 bp, synthetic construct
  misc_feature 1..27: note = Synthetic construct
  source 1..27: mol_type = other DNA
atgcaaactctccaagctccgtacact

SEQ ID NO: 12236 - DNA, 27 bp, synthetic construct
  misc_feature 1..27: note = Synthetic construct
  source 1..27: mol_type = other DNA
caacaggctaacagtttcccgatcacc

SEQ ID NO: 12237 - DNA, 30 bp, synthetic construct; identical to SEQ ID NO: 1881
  misc_feature 1..30: note = Synthetic construct
  source 1..30: mol_type = other DNA

SEQ ID NO: 12238 - DNA, 27 bp, synthetic construct
  misc_feature 1..27: note = Synthetic construct
  source 1..27: mol_type = other DNA
ctccagcacaatagtttcccgctcact

SEQ ID NO: 12239 - DNA, 27 bp, synthetic construct
  misc_feature 1..27: note = Synthetic construct
  source 1..27: mol_type = other DNA
caacagtatgaaaatctcccactcact

SEQ ID NO: 12240 - DNA, 24 bp, synthetic construct
  misc_feature 1..24: note = Synthetic construct
  source 1..24: mol_type = other DNA
atgcaaggtctacaaactccgact

SEQ ID NO: 12241 - DNA, 27 bp, synthetic construct
  misc_feature 1..27: note = Synthetic construct
  source 1..27: mol_type = other DNA
cagcaatattctagtactctttggaca

SEQ ID NO: 12242 - DNA, 33 bp, synthetic construct
  misc_feature 1..33: note = Synthetic construct
  source 1..33: mol_type = other DNA
agctcatatgcaaccagcgacaatttaagattg

SEQ ID NO: 12243 - DNA, 24 bp, synthetic construct
  misc_feature 1..24: note = Synthetic construct
  source 1..24: mol_type = other DNA
cagcaatattttattactccgact

SEQ ID NO: 12244 - DNA, 30 bp, synthetic construct
  misc_feature 1..30: note = Synthetic construct
  source 1..30: mol_type = other DNA
caagaatataatagttaccctatgtacact

SEQ ID NO: 12245 - DNA, 27 bp, synthetic construct
  misc_feature 1..27: note = Synthetic construct
  source 1..27: mol_type = other DNA
caacagtacagtacttatttcgtcact

SEQ ID NO: 12246 - DNA, 27 bp, synthetic construct
  misc_feature 1..27: note = Synthetic construct
  source 1..27: mol_type = other DNA
caacagagttacagtcccccgttcact

SEQ ID NO: 12247 - DNA, 36 bp, synthetic construct
  misc_feature 1..36: note = Synthetic construct
  source 1..36: mol_type = other DNA
caggtgtgggatagtactggtgttcacccttttgtc

SEQ ID NO: 12248 - DNA, 33 bp, synthetic construct
  misc_feature 1..33: note = Synthetic construct
  source 1..33: mol_type = other DNA
ggaacgtgggatgacagcctgaatgctggcgtc

SEQ ID NO: 12249 - DNA, 27 bp, synthetic construct
  misc_feature 1..27: note = Synthetic construct
  source 1..27: mol_type = other DNA
cagctgtattttggttcaggattcact

SEQ ID NO: 12250 - DNA, 27 bp, synthetic construct
  misc_feature 1..27: note = Synthetic construct
  source 1..27: mol_type = other DNA
cagcagtatggcagatcccctcggacg

SEQ ID NO: 12251 - DNA, 27 bp, synthetic construct
  misc_feature 1..27: note = Synthetic construct
  source 1..27: mol_type = other DNA
atgcaacctctacagctcccagacact

SEQ ID NO: 12252 - DNA, 30 bp, synthetic construct
  misc_feature 1..30: note = Synthetic construct
  source 1..30: mol_type = other DNA
agctcatatgcaggcactaacaattttgtc

SEQ ID NO: 12253 - DNA, 27 bp, synthetic construct
  misc_feature 1..27: note = Synthetic construct
  source 1..27: mol_type = other DNA
caacaatatggtaattcacctcagacg

SEQ ID NO: 12254 - DNA, 27 bp, synthetic construct
  misc_feature 1..27: note = Synthetic construct
  source 1..27: mol_type = other DNA
caccagtattatgcgaccccatacacc

SEQ ID NO: 12255 - DNA, 27 bp, synthetic construct
  misc_feature 1..27: note = Synthetic construct
  source 1..27: mol_type = other DNA
caacagagtttcagacccccgctcact

SEQ ID NO: 12256 - DNA, 30 bp, synthetic construct
  misc_feature 1..30: note = Synthetic construct
  source 1..30: mol_type = other DNA
cagcagcgtagcagctggcctccgatcacc

SEQ ID NO: 12257 - DNA, 33 bp, synthetic construct
  misc_feature 1..33: note = Synthetic construct
  source 1..33: mol_type = other DNA
caggtgtgggatagtagtgttgatcccgtgata

SEQ ID NO: 12258 - DNA, 33 bp, synthetic construct
  misc_feature 1..33: note = Synthetic construct
  source 1..33: mol_type = other DNA
ggaacatgggatgctagcgtgagtgttgcggta

SEQ ID NO: 12259 - DNA, 33 bp, synthetic construct
  misc_feature 1..33: note = Synthetic construct
  source 1..33: mol_type = other DNA
ggagcatgggatagcagcctgaatgttgtggtg

SEQ ID NO: 12260 - DNA, 27 bp, synthetic construct
  misc_feature 1..27: note = Synthetic construct
  source 1..27: mol_type = other DNA
caacaatattataatattccttggacg

SEQ ID NO: 12261 - DNA, 33 bp, synthetic construct
  misc_feature 1..33: note = Synthetic construct
  source 1..33: mol_type = other DNA
gcagcatgggatggcagcctgaatggttatgtc

SEQ ID NO: 12262 - DNA, 33 bp, synthetic construct
  misc_feature 1..33: note = Synthetic construct
  source 1..33: mol_type = other DNA
caacaatatgagaacatccctccggggctcacg

SEQ ID NO: 12263 - DNA, 33 bp, synthetic construct
  misc_feature 1..33: note = Synthetic construct
  source 1..33: mol_type = other DNA
agctcatatgaaaccagcaacaatttgaggtta

SEQ ID NO: 12264 - DNA, 27 bp, synthetic construct
  misc_feature 1..27: note = Synthetic construct
  source 1..27: mol_type = other DNA
cagcagtatggtagctcacctgggacg

SEQ ID NO: 12265 - DNA, 27 bp, synthetic construct
  misc_feature 1..27: note = Synthetic construct
  source 1..27: mol_type = other DNA
cagcagtatggcatctcaccgtacact

SEQ ID NO: 12266 - DNA, 30 bp, synthetic construct
  misc_feature 1..30: note = Synthetic construct
  source 1..30: mol_type = other DNA
atgcaagatgcacaagatcccttgttcact

SEQ ID NO: 12267 - DNA, 27 bp, synthetic construct
  misc_feature 1..27: note = Synthetic construct
  source 1..27: mol_type = other DNA
cagcagtctggtagctcaccgtacact

SEQ ID NO: 12268 - DNA, 27 bp, synthetic construct
  misc_feature 1..27: note = Synthetic construct
  source 1..27: mol_type = other DNA
caacaatattttcgtactcctccgact

SEQ ID NO: 12269 - DNA, 24 bp, synthetic construct
  misc_feature 1..24: note = Synthetic construct
  source 1..24: mol_type = other DNA
caacagagttacacttccctcact

SEQ ID NO: 12270 - DNA, 27 bp, synthetic construct
  misc_feature 1..27: note = Synthetic construct
  source 1..27: mol_type = other DNA
caacaggttgatgctgacccgatcacc

SEQ ID NO: 12271 - DNA, 33 bp, synthetic construct
  misc_feature 1..33: note = Synthetic construct
  source 1..33: mol_type = other DNA
ggaacatgggatagcagtttgagtggtggggtg

SEQ ID NO: 12272 - DNA, 33 bp, synthetic construct
  misc_feature 1..33: note = Synthetic construct
  source 1..33: mol_type = other DNA
gcctcatataccgttagtagtagtctcgaggtc

SEQ ID NO: 12273 - DNA, 27 bp, synthetic construct
  misc_feature 1..27: note = Synthetic construct
  source 1..27: mol_type = other DNA
caacaagcaaacagtttccctcacacg

SEQ ID NO: 12274 - DNA, 33 bp, synthetic construct
  misc_feature 1..33: note = Synthetic construct
  source 1..33: mol_type = other DNA
gcagcatgggatgacagcctgagtggtccggta

SEQ ID NO: 12275 - DNA, 27 bp, synthetic construct
  misc_feature 1..27: note = Synthetic construct
  source 1..27: mol_type = other DNA
atgcaaaataaacaggtttccataacc

SEQ ID NO: 12276 - DNA, 33 bp, synthetic construct
  misc_feature 1..33: note = Synthetic construct
  source 1..33: mol_type = other DNA
ggaacatgggataacagcctgagtgcttgggtg

SEQ ID NO: 12277 - DNA, 33 bp, synthetic construct
  misc_feature 1..33: note = Synthetic construct
  source 1..33: mol_type = other DNA
gcagcatgggatgacagcctgaatggttatgtc

SEQ ID NO: 12278 - DNA, 27 bp, synthetic construct
  misc_feature 1..27: note = Synthetic construct
  source 1..27: mol_type = other DNA
caccagtatgataagtctccctacact

SEQ ID NO: 12279 - DNA, 30 bp, synthetic construct
  misc_feature 1..30: note = Synthetic construct
  source 1..30: mol_type = other DNA
ctacaacatgataatttccctctcggctct

SEQ ID NO: 12280 - DNA, 30 bp, synthetic construct
  misc_feature 1..30: note = Synthetic construct
  source 1..30: mol_type = other DNA
caacagagtcacagttcctctccgtggacg

SEQ ID NO: 12281 - DNA, 27 bp, synthetic construct
  misc_feature 1..27: note = Synthetic construct
  source 1..27: mol_type = other DNA
atgcaagctctacaaactccgtggacg

SEQ ID NO: 12282 - DNA, 33 bp, synthetic construct
  misc_feature 1..33: note = Synthetic construct
  source 1..33: mol_type = other DNA
cagtcctatgacagcagcctgagtggttgggtg

SEQ ID NO: 12283 - DNA, 27 bp, synthetic construct
  misc_feature 1..27: note = Synthetic construct
  source 1..27: mol_type = other DNA
caacaatattatgatacccctcggacg

SEQ ID NO: 12284 - DNA, 27 bp, synthetic construct
  misc_feature 1..27: note = Synthetic construct
  source 1..27: mol_type = other DNA
cttcagcacaatggttaccctcggtcg

SEQ ID NO: 12285 - DNA, 33 bp, synthetic construct
  misc_feature 1..33: note = Synthetic construct
  source 1..33: mol_type = other DNA
cagtcactagacagtagtggtgtttatgtggta

SEQ ID NO: 12286 - DNA, 27 bp, synthetic construct
  misc_feature 1..27: note = Synthetic construct
  source 1..27: mol_type = other DNA
caacagtattttgatctccgtttcggt

SEQ ID NO: 12287 - DNA, 27 bp, synthetic construct
  misc_feature 1..27: note = Synthetic construct
  source 1..27: mol_type = other DNA
agctcgtatacaagcaacattatttta

SEQ ID NO: 12288 - DNA, 27 bp, synthetic construct
  misc_feature 1..27: note = Synthetic construct
  source 1..27: mol_type = other DNA
cagcagactaccagtttccctctcact

SEQ ID NO: 12289 - DNA, 27 bp, synthetic construct
  misc_feature 1..27: note = Synthetic construct
  source 1..27: mol_type = other DNA
cagcactttaacggttctcctctcact

SEQ ID NO: 12290 - DNA, 36 bp, synthetic construct
  misc_feature 1..36: note = Synthetic construct
  source 1..36: mol_type = other DNA
caggtgtgggacagtagtagtgatcacccctatgtc

SEQ ID NO: 12291 - DNA, 27 bp, synthetic construct
  misc_feature 1..27: note = Synthetic construct
  source 1..27: mol_type = other DNA
caacagcttaatagttacccgctcact

SEQ ID NO: 12292 - DNA, 30 bp, synthetic construct
  misc_feature 1..30: note = Synthetic construct
  source 1..30: mol_type = other DNA
aactcatatacaagcagcagcacttatgtc

SEQ ID NO: 12293 - DNA, 27 bp, synthetic construct
  misc_feature 1..27: note = Synthetic construct
  source 1..27: mol_type = other DNA
caacactataatgactggcaaatcact

SEQ ID NO: 12294 - DNA, 27 bp, synthetic construct
  misc_feature 1..27: note = Synthetic construct
  source 1..27: mol_type = other DNA
gaacagacctatagtattccgtggact

SEQ ID NO: 12295 - DNA, 27 bp, synthetic construct
  misc_feature 1..27: note = Synthetic construct
  source 1..27: mol_type = other DNA
cagcagcgtttcaagtggcccatcacc

SEQ ID NO: 12296 - DNA, 33 bp, synthetic construct
  misc_feature 1..33: note = Synthetic construct
  source 1..33: mol_type = other DNA
cagtcctttgacgacagcctgaatgcttcgctg

SEQ ID NO: 12297 - DNA, 33 bp, synthetic construct
  misc_feature 1..33: note = Synthetic construct
  source 1..33: mol_type = other DNA
aactgccgagacaccagtggtgacccttgggtg

SEQ ID NO: 12298 - DNA, 30 bp, synthetic construct
  misc_feature 1..30: note = Synthetic construct
  source 1..30: mol_type = other DNA
cagcagcgtagcaactggccctcggtcact

SEQ ID NO: 12299 - DNA, 27 bp, synthetic construct
  misc_feature 1..27: note = Synthetic construct
  source 1..27: mol_type = other DNA
acgcaagctacacaattcccctacact

SEQ ID NO: 12300 - DNA, 27 bp, synthetic construct
  misc_feature 1..27: note = Synthetic construct
  source 1..27: mol_type = other DNA
caacaggctaacagtttacctctcact

SEQ ID NO: 12301 - DNA, 27 bp, synthetic construct
  misc_feature 1..27: note = Synthetic construct
  source 1..27: mol_type = other DNA
catcaaagtagtagtttaccgtacact

SEQ ID NO: 12302 - DNA, 27 bp, synthetic construct
  misc_feature 1..27: note = Synthetic construct
  source 1..27: mol_type = other DNA
cagcagtatggtagttcacctcggacg

SEQ ID NO: 12303 - DNA, 15 bp, synthetic construct
  misc_feature 1..15: note = Synthetic construct
  source 1..15: mol_type = other DNA
caacagagtggcact

SEQ ID NO: 12304 - DNA, 24 bp, synthetic construct
  misc_feature 1..24: note = Synthetic construct
  source 1..24: mol_type = other DNA
caacagtatcattcttattcgacg

SEQ ID NO: 12305 - DNA, 33 bp, synthetic construct
  misc_feature 1..33: note = Synthetic construct
  source 1..33: mol_type = other DNA
caggagtataatagctggcctccggagtacgct

SEQ ID NO: 12306 - DNA, 33 bp, synthetic construct
  misc_feature 1..33: note = Synthetic construct
  source 1..33: mol_type = other DNA
cagcagtatggtagctcacctccgatgtacacc

SEQ ID NO: 12307 - DNA, 27 bp, synthetic construct
  misc_feature 1..27: note = Synthetic construct
  source 1..27: mol_type = other DNA
caacagttttttcgaaccccgtacact

SEQ ID NO: 12308 - DNA, 24 bp, synthetic construct
  misc_feature 1..24: note = Synthetic construct
  source 1..24: mol_type = other DNA
atgatttggtcagacgcgtatgtc

SEQ ID NO: 12309 - DNA, 27 bp, synthetic construct
  misc_feature 1..27: note = Synthetic construct
  source 1..27: mol_type = other DNA
caacagtatgatgatcttccgctcact

SEQ ID NO: 12310 - DNA, 27 bp, synthetic construct
  misc_feature 1..27: note = Synthetic construct
  source 1..27: mol_type = other DNA
caacaggctgacaatttgccgtggacg

SEQ ID NO: 12311 - DNA, 33 bp, synthetic construct
  misc_feature 1..33: note = Synthetic construct
  source 1..33: mol_type = other DNA
cagcagcgtagcgactggcctccggtgtacact

SEQ ID NO: 12312 - DNA, 33 bp, synthetic construct
  misc_feature 1..33: note = Synthetic construct
  source 1..33: mol_type = other DNA
gccgcttgggacgaccacctgcgaattgtgggt

SEQ ID NO: 12313 - DNA, 33 bp, synthetic construct
  misc_feature 1..33: note = Synthetic construct
  source 1..33: mol_type = other DNA
caggtgtgggatagtagtagtgatccccgggtg

SEQ ID NO: 12314 - DNA, 27 bp, synthetic construct
  misc_feature 1..27: note = Synthetic construct
  source 1..27: mol_type = other DNA
cagcaatattatagtactccgtggacg

SEQ ID NO: 12315 - DNA, 33 bp, synthetic construct
  misc_feature 1..33: note = Synthetic construct
  source 1..33: mol_type = other DNA
gcagcatgggatgacagcctgaatggtcccgtc

SEQ ID NO: 12316 - DNA, 33 bp, synthetic construct
  misc_feature 1..33: note = Synthetic construct
  source 1..33: mol_type = other DNA
cagtcctatgacaacagcctgagtggttatgtc

SEQ ID NO: 12317 - DNA, 33 bp, synthetic construct
  misc_feature 1..33: note = Synthetic construct
  source 1..33: mol_type = other DNA
gtcgtttgggatgtcagactgagtgggtatgtc

SEQ ID NO: 12318 - DNA, 27 bp, synthetic construct
  misc_feature 1..27: note = Synthetic construct
  source 1..27: mol_type = other DNA
caacaggctaacagtttcccctacact

SEQ ID NO: 12319 - DNA, 27 bp, synthetic construct
  misc_feature 1..27: note = Synthetic construct
  source 1..27: mol_type = other DNA
caacagggttacagtaccccattcact

SEQ ID NO: 12320 - DNA, 33 bp, synthetic construct
  misc_feature 1..33: note = Synthetic construct
  source 1..33: mol_type = other DNA
caggtgtgggatagtattagtgagcatcaagtg

SEQ ID NO: 12321 - DNA, 33 bp, synthetic construct
  misc_feature 1..33: note = Synthetic construct
  source 1..33: mol_type = other DNA
ggagcctgggacagcagcctgagagcggtggtg

SEQ ID NO: 12322 - DNA, 27 bp, synthetic construct
  misc_feature 1..27: note = Synthetic construct
  source 1..27: mol_type = other DNA
caacagtattatagtctccctctcact

SEQ ID NO: 12323 - DNA, 27 bp, synthetic construct
  misc_feature 1..27: note = Synthetic construct
  source 1..27: mol_type = other DNA
cagcagtatagttcctcacctcggacg

SEQ ID NO: 12324 - DNA, 27 bp, synthetic construct
  misc_feature 1..27: note = Synthetic construct
  source 1..27: mol_type = other DNA
atgcaaagtctacagactccgccgacg

SEQ ID NO: 12325 - DNA, 27 bp, synthetic construct
  misc_feature 1..27: note = Synthetic construct
  source 1..27: mol_type = other DNA
caacagagtttcagctccctttggacg

SEQ ID NO: 12326 - DNA, 30 bp, synthetic construct
  misc_feature 1..30: note = Synthetic construct
  source 1..30: mol_type = other DNA
agctcctatacaagcggtcgtattctggtt

SEQ ID NO: 12327 - DNA, 27 bp, synthetic construct
  misc_feature 1..27: note = Synthetic construct
  source 1..27: mol_type = other DNA
atgcaaactctacaaactcctctcact

SEQ ID NO: 12328 - DNA, 27 bp, synthetic construct
  misc_feature 1..27: note = Synthetic construct
  source 1..27: mol_type = other DNA
caacagtattatagttaccccctcact

SEQ ID NO: 12329 - DNA, 33 bp, synthetic construct
  misc_feature 1..33: note = Synthetic construct
  source 1..33: mol_type = other DNA
aactcccgggacagcagtggtaaccattgggtg

SEQ ID NO: 12330 - DNA, 33 bp, synthetic construct
  misc_feature 1..33: note = Synthetic construct
  source 1..33: mol_type = other DNA
ggaacatgggatagcagcctgagtgctgtggta

SEQ ID NO: 12331 - DNA, 33 bp, synthetic construct
  misc_feature 1..33: note = Synthetic construct
  source 1..33: mol_type = other DNA
ggaacatgggatagcagcctgagtgctaaagta

SEQ ID NO: 12332 - DNA, 30 bp, synthetic construct
  misc_feature 1..30: note = Synthetic construct
  source 1..30: mol_type = other DNA
caacagagttacagtacccccccgtacact

SEQ ID NO: 12333 - DNA, 27 bp, synthetic construct
  misc_feature 1..27: note = Synthetic construct
  source 1..27: mol_type = other DNA
caacagagttacagtacccctagaacg

SEQ ID NO: 12334 - DNA, 24 bp, synthetic construct
  misc_feature 1..24: note = Synthetic construct
  source 1..24: mol_type = other DNA
caacagtatgattatatccctcgc

SEQ ID NO: 12335 - DNA, 24 bp, synthetic construct
  misc_feature 1..24: note = Synthetic construct
  source 1..24: mol_type = other DNA
caacaatattattcttactctacg

SEQ ID NO: 12336 - DNA, 27 bp, synthetic construct
  misc_feature 1..27: note = Synthetic construct
  source 1..27: mol_type = other DNA
cagcaatattttagtactccgtacact

SEQ ID NO: 12337 - DNA, 30 bp, synthetic construct
  misc_feature 1..30: note = Synthetic construct
  source 1..30: mol_type = other DNA
cagcagcgtagcacctggcctccggggact

SEQ ID NO: 12338 - DNA, 27 bp, synthetic construct
  misc_feature 1..27: note = Synthetic construct
  source 1..27: mol_type = other DNA
caacaatatgagagttatccgatcact

SEQ ID NO: 12339 - DNA, 27 bp, synthetic construct
  misc_feature 1..27: note = Synthetic construct
  source 1..27: mol_type = other DNA
caacattattataattaccctttcact

SEQ ID NO: 12340 - DNA, 27 bp, synthetic construct
  misc_feature 1..27: note = Synthetic construct
  source 1..27: mol_type = other DNA
ctacagcataatagttaccctcggacg

SEQ ID NO: 12341 - DNA, 27 bp, synthetic construct
  misc_feature 1..27: note = Synthetic construct
  source 1..27: mol_type = other DNA
caacaatattataatactccgtacact

SEQ ID NO: 12342 - DNA, 27 bp, synthetic construct
  misc_feature 1..27: note = Synthetic construct
  source 1..27: mol_type = other DNA
cagcagtataataactggcctcacact

SEQ ID NO: 12343 - DNA, 27 bp, synthetic construct
  misc_feature 1..27: note = Synthetic construct
  source 1..27: mol_type = other DNA
cagacctggggcaaaggcattcaggtg

SEQ ID NO: 12344 - DNA, 33 bp, synthetic construct
  misc_feature 1..33: note = Synthetic construct
  source 1..33: mol_type = other DNA
cagtcctatgacaacagcctgagaacttcggtg

SEQ ID NO: 12345 - DNA, 27 bp, synthetic construct
  misc_feature 1..27: note = Synthetic construct
  source 1..27: mol_type = other DNA
caccaatataaaaacgcggggtggacg

SEQ ID NO: 12346 - DNA, 27 bp, synthetic construct
  misc_feature 1..27: note = Synthetic construct
  source 1..27: mol_type = other DNA
cagcagcgtgacacctggccttggacg

SEQ ID NO: 12347 - DNA, 27 bp, synthetic construct
  misc_feature 1..27: note = Synthetic construct
  source 1..27: mol_type = other DNA
caacagtttaatagttaccctcgcact

SEQ ID NO: 12348 - DNA, 27 bp, synthetic construct
  misc_feature 1..27: note = Synthetic construct
  source 1..27: mol_type = other DNA
ctgctctactatggtggtgcttgggtg

SEQ ID NO: 12349 - DNA, 27 bp, synthetic construct
  misc_feature 1..27: note = Synthetic construct
  source 1..27: mol_type = other DNA
cagcagtatggtagctcacttatcacc

SEQ ID NO: 12350 - DNA, 27 bp, synthetic construct
  misc_feature 1..27: note = Synthetic construct
  source 1..27: mol_type = other DNA
cagcagtatggtagctcacctctcact

SEQ ID NO: 12351 - DNA, 27 bp, synthetic construct
  misc_feature 1..27: note = Synthetic construct
  source 1..27: mol_type = other DNA
caacagtataatagttatccgtacact

SEQ ID NO: 12352 - DNA, 27 bp, synthetic construct
  misc_feature 1..27: note = Synthetic construct
  source 1..27: mol_type = other DNA
caacagtattatagtttcccgctcact

SEQ ID NO: 12353 - DNA, 27 bp, synthetic construct
  misc_feature 1..27: note = Synthetic construct
  source 1..27: mol_type = other DNA
caacagtataatagttatttgtggacg

SEQ ID NO: 12354 - DNA, 30 bp, synthetic construct
  misc_feature 1..30: note = Synthetic construct
  source 1..30: mol_type = other DNA
cagcagtatggtagctcaccactattcact

SEQ ID NO: 12355 - DNA, 33 bp, synthetic construct
  misc_feature 1..33: note = Synthetic construct
  source 1..33: mol_type = other DNA
aactcccgggacagcagtggtaaccatgtggtc

SEQ ID NO: 12356 - DNA, 27 bp, synthetic construct
  misc_feature 1..27: note = Synthetic construct
  source 1..27: mol_type = other DNA
caacagtttgataatctccctatcacc

SEQ ID NO: 12357 - DNA, 27 bp, synthetic construct
  misc_feature 1..27: note = Synthetic construct
  source 1..27: mol_type = other DNA
caacagagttacagcatcccgtacact

SEQ ID NO: 12358 - DNA, 27 bp, synthetic construct
  misc_feature 1..27: note = Synthetic construct
  source 1..27: mol_type = other DNA
atgcaacgtatagagtttccttggacg

SEQ ID NO: 12359 - DNA, 27 bp, synthetic construct
  misc_feature 1..27: note = Synthetic construct
  source 1..27: mol_type = other DNA
caacactataatggttatccgtggacg

SEQ ID NO: 12360 - DNA, 27 bp, synthetic construct
  misc_feature 1..27: note = Synthetic construct
  source 1..27: mol_type = other DNA
caacagcttaatagttaccctcctcat

SEQ ID NO: 12361 - DNA, 30 bp, synthetic construct
  misc_feature 1..30: note = Synthetic construct
  source 1..30: mol_type = other DNA
agctcatatacaagcagcagcacttatgtc

SEQ ID NO: 12362 - DNA, 27 bp, synthetic construct
  misc_feature 1..27: note = Synthetic construct
  source 1..27: mol_type = other DNA
caacaggctaacagtttcccgtacact

SEQ ID NO: 12363 - DNA, 27 bp, synthetic construct
  misc_feature 1..27: note = Synthetic construct
  source 1..27: mol_type = other DNA
cagcagtataataactggccgtacact

SEQ ID NO: 12364 - DNA, 27 bp, synthetic construct
  misc_feature 1..27: note = Synthetic construct
  source 1..27: mol_type = other DNA
caacagagttacagtaccctctacact

SEQ ID NO: 12365 - DNA, 30 bp, synthetic construct
  misc_feature 1..30: note = Synthetic construct
  source 1..30: mol_type = other DNA
cagcaatattatactactcccacgtggacg

SEQ ID NO: 12366 - DNA, 33 bp, synthetic construct
  misc_feature 1..33: note = Synthetic construct
  source 1..33: mol_type = other DNA
caggtgtgggataacactgatgatcctgtggta

SEQ ID NO: 12367 - DNA, 27 bp, synthetic construct
  misc_feature 1..27: note = Synthetic construct
  source 1..27: mol_type = other DNA
cagcagagtctcagtaccctgatcact

SEQ ID NO: 12368 - DNA, 27 bp, synthetic construct
  misc_feature 1..27: note = Synthetic construct
  source 1..27: mol_type = other DNA
caacagagttacattacccctctcact

SEQ ID NO: 12369 - DNA, 30 bp, synthetic construct
  misc_feature 1..30: note = Synthetic construct
  source 1..30: mol_type = other DNA
tcctcatacgcaagtgggggcactgtggtt

SEQ ID NO: 12370 - DNA, 27 bp, synthetic construct
  misc_feature 1..27: note = Synthetic construct
  source 1..27: mol_type = other DNA
cagcagggtaacaactggccgctcact

SEQ ID NO: 12371 - DNA, 30 bp, synthetic construct
  misc_feature 1..30: note = Synthetic construct
  source 1..30: mol_type = other DNA
cagacttgggacagcagcacttcttatctc

SEQ ID NO: 12372 - DNA, 30 bp, synthetic construct
  misc_feature 1..30: note = Synthetic construct
  source 1..30: mol_type = other DNA
cagcaatattatagtgctcctccctggacg

SEQ ID NO: 12373 - DNA, 33 bp, synthetic construct
  misc_feature 1..33: note = Synthetic construct
  source 1..33: mol_type = other DNA
gcaacatgggatgacagtctgaatgctgtggtt

SEQ ID NO: 12374 - DNA, 39 bp, synthetic construct
  misc_feature 1..39: note = Synthetic construct
  source 1..39: mol_type = other DNA
gaagcatgggagagcagcctgagtggtggccatggggtc

SEQ ID NO: 12375 - DNA, 27 bp, synthetic construct
  misc_feature 1..27: note = Synthetic construct
  source 1..27: mol_type = other DNA
caacaacttaatacttaccctcggact

SEQ ID NO: 12376 - DNA, 27 bp, synthetic construct
  misc_feature 1..27: note = Synthetic construct
  source 1..27: mol_type = other DNA
caacagagttacaagttccctcggacg

SEQ ID NO: 12377 - DNA, 33 bp, synthetic construct
  misc_feature 1..33: note = Synthetic construct
  source 1..33: mol_type = other DNA
cagtcctatgacagcagcctgagtggtgtggtt

SEQ ID NO: 12378 - DNA, 33 bp, synthetic construct
  misc_feature 1..33: note = Synthetic construct
  source 1..33: mol_type = other DNA
caatcagcagacagcagtgattcttatagggtc

SEQ ID NO: 12379 - DNA, 27 bp, synthetic construct
  misc_feature 1..27: note = Synthetic construct
  source 1..27: mol_type = other DNA
cagtactatggtggctcaccaaagacg

SEQ ID NO: 12380 - DNA, 24 bp, synthetic construct
  misc_feature 1..24: note = Synthetic construct
  source 1..24: mol_type = other DNA
caacattattatagtcaaacaatg

SEQ ID NO: 12381 - DNA, 27 bp, synthetic construct
  misc_feature 1..27: note = Synthetic construct
  source 1..27: mol_type = other DNA
caacagagtgacagtaccctgccctct

SEQ ID NO: 12382 - DNA, 27 bp, synthetic construct
  misc_feature 1..27: note = Synthetic construct
  source 1..27: mol_type = other DNA
cagcagtatggtagctcactctggacg

SEQ ID NO: 12383 - DNA, 33 bp, synthetic construct
  misc_feature 1..33: note = Synthetic construct
  source 1..33: mol_type = other DNA
cagtcccatgacaccagccttcctggttcggtg

SEQ ID NO: 12384 - DNA, 27 bp, synthetic construct
  misc_feature 1..27: note = Synthetic construct
  source 1..27: mol_type = other DNA
caacagagtttcagttccgtttggacg

SEQ ID NO: 12385 - DNA, 27 bp, synthetic construct
  misc_feature 1..27: note = Synthetic construct
  source 1..27: mol_type = other DNA
ctgcagtatgatcactggatttacact

SEQ ID NO: 12386 - DNA, 27 bp, synthetic construct
  misc_feature 1..27: note = Synthetic construct
  source 1..27: mol_type = other DNA
atgcaaggtacacattggcctccgggc

SEQ ID NO: 12387 - DNA, 24 bp, synthetic construct
  misc_feature 1..24: note = Synthetic construct
  source 1..24: mol_type = other DNA
cagcagcgtagcgactggctcact

SEQ ID NO: 12388 - DNA, 33 bp, synthetic construct
  misc_feature 1..33: note = Synthetic construct
  source 1..33: mol_type = other DNA
tgctcatattcaagaggggacaccctgtatgtc

SEQ ID NO: 12389 - DNA, 27 bp, synthetic construct
  misc_feature 1..27: note = Synthetic construct
  source 1..27: mol_type = other DNA
cagcaatattataataagcctcccact

SEQ ID NO: 12390 - DNA, 27 bp, synthetic construct
  misc_feature 1..27: note = Synthetic construct
  source 1..27: mol_type = other DNA
caggcgtgggacagcagcactgtgcta

SEQ ID NO: 12391 - DNA, 27 bp, synthetic construct
  misc_feature 1..27: note = Synthetic construct
  source 1..27: mol_type = other DNA
cagcaatatactctctcgcctcacaat

SEQ ID NO: 12392 - DNA, 33 bp, synthetic construct
  misc_feature 1..33: note = Synthetic construct
  source 1..33: mol_type = other DNA
cagtcctatgacagcagcctgagtggtcatgtt

SEQ ID NO: 12393 - DNA, 27 bp, synthetic construct
  misc_feature 1..27: note = Synthetic construct
  source 1..27: mol_type = other DNA
caacagagttacattaccccgtggacg

SEQ ID NO: 12394 - DNA, 30 bp, synthetic construct
  misc_feature 1..30: note = Synthetic construct
  source 1..30: mol_type = other DNA
tgctcatatgcaggcagctacactttggtg

SEQ ID NO: 12395 - DNA, 27 bp, synthetic construct
  misc_feature 1..27: note = Synthetic construct
  source 1..27: mol_type = other DNA
caacagagttacagtacccctcggact

SEQ ID NO: 12396 - DNA, 36 bp, synthetic construct
  misc_feature 1..36: note = Synthetic construct
  source 1..36: mol_type = other DNA
caggtgtgggataatagtagtgatcatcctttagta

SEQ ID NO: 12397 - DNA, 30 bp, synthetic construct
  misc_feature 1..30: note = Synthetic construct
  source 1..30: mol_type = other DNA
cttcaggattccaattacccttttgtcact

SEQ ID NO: 12398 - DNA, 27 bp, synthetic construct
  misc_feature 1..27: note = Synthetic construct
  source 1..27: mol_type = other DNA
caacagtattatagttacccgtacact

SEQ ID NO: 12399 - DNA, 27 bp, synthetic construct
  misc_feature 1..27: note = Synthetic construct
  source 1..27: mol_type = other DNA
caacagagtttcactacccctcccact

SEQ ID NO: 12400 - DNA, 27 bp, synthetic construct
  misc_feature 1..27: note = Synthetic construct
  source 1..27: mol_type = other DNA
cagcaatatgatacgtggcctcggact

SEQ ID NO: 12401 - DNA, 33 bp, synthetic construct
  misc_feature 1..33: note = Synthetic construct
  source 1..33: mol_type = other DNA
tgctcatatgcaggcaggaactcggggaatgtc

SEQ ID NO: 12402 - DNA, 33 bp, synthetic construct
  misc_feature 1..33: note = Synthetic construct
  source 1..33: mol_type = other DNA
caggtgtgggacagtagtagtgatcatccggta

SEQ ID NO: 12403 - DNA, 27 bp, synthetic construct
  misc_feature 1..27: note = Synthetic construct
  source 1..27: mol_type = other DNA
caacagtattatagttccccgtacact

SEQ ID NO: 12404 - DNA, 33 bp, synthetic construct
  misc_feature 1..33: note = Synthetic construct
  source 1..33: mol_type = other DNA
caggtgtgggaccattctaatgatcattttgtc

SEQ ID NO: 12405 - DNA, 33 bp, synthetic construct
  misc_feature 1..33: note = Synthetic construct
  source 1..33: mol_type = other DNA
cagtcctttgacagcagcctgagtggttttgtc

SEQ ID NO: 12406 - DNA, 33 bp, synthetic construct
  misc_feature 1..33: note = Synthetic construct
  source 1..33: mol_type = other DNA
ggaacatgggatagcagcctgactgctggggtc

SEQ ID NO: 12407 - DNA, 27 bp, synthetic construct
  misc_feature 1..27: note = Synthetic construct
  source 1..27: mol_type = other DNA
cagcagtatggttcctctttattcact

SEQ ID NO: 12408 - DNA, 27 bp, synthetic construct
  misc_feature 1..27: note = Synthetic construct
  source 1..27: mol_type = other DNA
caacagagttacagtacccctccgacg

SEQ ID NO: 12409 - DNA, 27 bp, synthetic construct
  misc_feature 1..27: note = Synthetic construct
  source 1..27: mol_type = other DNA
atgcaaggtatacaccttccgtggacg

SEQ ID NO: 12410 - DNA, 33 bp, synthetic construct
  misc_feature 1..33: note = Synthetic construct
  source 1..33: mol_type = other DNA
cagcagtataataactggcctcccaaatacact

SEQ ID NO: 12411 - DNA, 33 bp, synthetic construct
  misc_feature 1..33: note = Synthetic construct
  source 1..33: mol_type = other DNA
tgctcatatgcaggtagtagcactttcgtgcta

SEQ ID NO: 12412 - DNA, 30 bp, synthetic construct
  misc_feature 1..30: note = Synthetic construct
  source 1..30: mol_type = other DNA
tgttcatattcaggcaggaacaacgatgtc

SEQ ID NO: 12413 - DNA, 33 bp, synthetic construct
  misc_feature 1..33: note = Synthetic construct
  source 1..33: mol_type = other DNA
gcagcatgggatgacagcctgaatactaatgtc

SEQ ID NO: 12414 - DNA, 27 bp, synthetic construct
  misc_feature 1..27: note = Synthetic construct
  source 1..27: mol_type = other DNA
cagtggagttccagtgtcttggtgacg

SEQ ID NO: 12415 - DNA, 30 bp, synthetic construct
  misc_feature 1..30: note = Synthetic construct
  source 1..30: mol_type = other DNA
cagtcagcagacagcagtggcacttgggtg

SEQ ID NO: 12416 - DNA, 24 bp, synthetic construct
  misc_feature 1..24: note = Synthetic construct
  source 1..24: mol_type = other DNA
caacagcgtagcaactggtggacg

SEQ ID NO: 12417 - DNA, 30 bp, synthetic construct
  misc_feature 1..30: note = Synthetic construct
  source 1..30: mol_type = other DNA
acctcatatacaggcatctctctctatgtc

SEQ ID NO: 12418 - DNA, 24 bp, synthetic construct
  misc_feature 1..24: note = Synthetic construct
  source 1..24: mol_type = other DNA
cagcaatatagtggttattggacg

SEQ ID NO: 12419 - DNA, 24 bp, synthetic construct
  misc_feature 1..24: note = Synthetic construct
  source 1..24: mol_type = other DNA
cagcaatatgatacctcagggacg

SEQ ID NO: 12420 - DNA, 27 bp, synthetic construct
  misc_feature 1..27: note = Synthetic construct
  source 1..27: mol_type = other DNA
caatcagcaaacagcagtgcctccgtc

SEQ ID NO: 12421 - DNA, 27 bp, synthetic construct
  misc_feature 1..27: note = Synthetic construct
  source 1..27: mol_type = other DNA
cagctctatgataactcccggtacact

SEQ ID NO: 12422 - DNA, 30 bp, synthetic construct
  misc_feature 1..30: note = Synthetic construct
  source 1..30: mol_type = other DNA
caacagcttagttcttaccctccgatcacc

SEQ ID NO: 12423 - DNA, 33 bp, synthetic construct
  misc_feature 1..33: note = Synthetic construct
  source 1..33: mol_type = other DNA
ggaacatgggataccagcctgagtggtgtggtt

SEQ ID NO: 12424 - DNA, 27 bp, synthetic construct
  misc_feature 1..27: note = Synthetic construct
  source 1..27: mol_type = other DNA
ctacagtataataattaccctcgcacg

SEQ ID NO: 12425 - DNA, 33 bp, synthetic construct
  misc_feature 1..33: note = Synthetic construct
  source 1..33: mol_type = other DNA
tgttcatatgcaggtagtagccctaattatgtc

SEQ ID NO: 12426 - DNA, 33 bp, synthetic construct; identical to SEQ ID NO: 1882
  misc_feature 1..33: note = Synthetic construct
  source 1..33: mol_type = other DNA

SEQ ID NO: 12427 - DNA, 33 bp, synthetic construct
  misc_feature 1..33: note = Synthetic construct
  source 1..33: mol_type = other DNA
cacctgtgggatagtagtagtggtcgctgggtg

SEQ ID NO: 12428 - DNA, 30 bp, synthetic construct
  misc_feature 1..30: note = Synthetic construct
  source 1..30: mol_type = other DNA
cagcactatggagactcagcggcgtacact

SEQ ID NO: 12429 - DNA, 27 bp, synthetic construct
  misc_feature 1..27: note = Synthetic construct
  source 1..27: mol_type = other DNA
caacaggctgacactttcccattcaat

SEQ ID NO: 12430 - DNA, 27 bp, synthetic construct
  misc_feature 1..27: note = Synthetic construct
  source 1..27: mol_type = other DNA
cagcagtatgctagttcacctcggacg

SEQ ID NO: 12431 - DNA, 24 bp, synthetic construct
  misc_feature 1..24: note = Synthetic construct
  source 1..24: mol_type = other DNA
caacaatatggtagtacactcact

SEQ ID NO: 12432 - DNA, 36 bp, synthetic construct
  misc_feature 1..36: note = Synthetic construct
  source 1..36: mol_type = other DNA
caggtgtgggatagtagttctgctcatgtttatgtc

SEQ ID NO: 12433 - DNA, 33 bp, synthetic construct
  misc_feature 1..33: note = Synthetic construct
  source 1..33: mol_type = other DNA
tgctcatatgcaggtagcagtcttcattatgtc

SEQ ID NO: 12434 - DNA, 30 bp, synthetic construct
  misc_feature 1..30: note = Synthetic construct
  source 1..30: mol_type = other DNA
cagtcctatgacaccagcctgagtggtgtc

SEQ ID NO: 12435 - DNA, 24 bp, synthetic construct
  misc_feature 1..24: note = Synthetic construct
  source 1..24: mol_type = other DNA
caacaatataatagttattgcagt

SEQ ID NO: 12436 - DNA, 36 bp, synthetic construct; identical to SEQ ID NO: 8520
  misc_feature 1..36: note = Synthetic construct
  source 1..36: mol_type = other DNA

SEQ ID NO: 12437 - DNA, 33 bp, synthetic construct; identical to SEQ ID NO: 8521
  misc_feature 1..33: note = Synthetic construct
  source 1..33: mol_type = other DNA

SEQ ID NO: 12438 - DNA, 39 bp, synthetic construct; identical to SEQ ID NO: 8522
  misc_feature 1..39: note = Synthetic construct
  source 1..39: mol_type = other DNA

SEQ ID NO: 12439 - DNA, 33 bp, synthetic construct; identical to SEQ ID NO: 8523
  misc_feature 1..33: note = Synthetic construct
  source 1..33: mol_type = other DNA

SEQ ID NO: 12440 - DNA, 30 bp, synthetic construct; identical to SEQ ID NO: 8524
  misc_feature 1..30: note = Synthetic construct
  source 1..30: mol_type = other DNA

SEQ ID NO: 12441 - DNA, 39 bp, synthetic construct; identical to SEQ ID NO: 8525
  misc_feature 1..39: note = Synthetic construct
  source 1..39: mol_type = other DNA

SEQ ID NO: 12442 - DNA, 33 bp, synthetic construct; identical to SEQ ID NO: 8526
  misc_feature 1..33: note = Synthetic construct
  source 1..33: mol_type = other DNA

SEQ ID NO: 12443 - DNA, 36 bp, synthetic construct; identical to SEQ ID NO: 8527
  misc_feature 1..36: note = Synthetic construct
  source 1..36: mol_type = other DNA

SEQ ID NO: 12444 - DNA, 33 bp, synthetic construct; identical to SEQ ID NO: 8528
  misc_feature 1..33: note = Synthetic construct
  source 1..33: mol_type = other DNA

SEQ ID NO: 12445 - DNA, 33 bp, synthetic construct; identical to SEQ ID NO: 8529
  misc_feature 1..33: note = Synthetic construct
  source 1..33: mol_type = other DNA

SEQ ID NO: 12446 - DNA, 42 bp, synthetic construct; identical to SEQ ID NO: 8530
  misc_feature 1..42: note = Synthetic construct
  source 1..42: mol_type = other DNA

SEQ ID NO: 12447 - DNA, 33 bp, synthetic construct; identical to SEQ ID NO: 8531
  misc_feature 1..33: note = Synthetic construct
  source 1..33: mol_type = other DNA

SEQ ID NO: 12448 - DNA, 39 bp, synthetic construct; identical to SEQ ID NO: 8532
  misc_feature 1..39: note = Synthetic construct
  source 1..39: mol_type = other DNA

SEQ ID NO: 12449 - DNA, 39 bp, synthetic construct; identical to SEQ ID NO: 8533
  misc_feature 1..39: note = Synthetic construct
  source 1..39: mol_type = other DNA

SEQ ID NO: 12450 - DNA, 30 bp, synthetic construct; identical to SEQ ID NO: 8534
  misc_feature 1..30: note = Synthetic construct
  source 1..30: mol_type = other DNA

SEQ ID NO: 12451 - DNA, 33 bp, synthetic construct; identical to SEQ ID NO: 8535
  misc_feature 1..33: note = Synthetic construct
  source 1..33: mol_type = other DNA

SEQ ID NO: 12452 - DNA, 33 bp, synthetic construct; identical to SEQ ID NO: 8536
  misc_feature 1..33: note = Synthetic construct
  source 1..33: mol_type = other DNA

SEQ ID NO: 12453 - DNA, 39 bp, synthetic construct; identical to SEQ ID NO: 8537
  misc_feature 1..39: note = Synthetic construct
  source 1..39: mol_type = other DNA

SEQ ID NO: 12454 - DNA, 33 bp, synthetic construct; identical to SEQ ID NO: 8538
  misc_feature 1..33: note = Synthetic construct
  source 1..33: mol_type = other DNA

SEQ ID NO: 12455 - DNA, 39 bp, synthetic construct; identical to SEQ ID NO: 8539
  misc_feature 1..39: note = Synthetic construct
  source 1..39: mol_type = other DNA

SEQ ID NO: 12456 - DNA, 36 bp, synthetic construct; identical to SEQ ID NO: 8540
  misc_feature 1..36: note = Synthetic construct
  source 1..36: mol_type = other DNA

SEQ ID NO: 12457 - DNA, 33 bp, synthetic construct; identical to SEQ ID NO: 8541
  misc_feature 1..33: note = Synthetic construct
  source 1..33: mol_type = other DNA

SEQ ID NO: 12458 - DNA, 39 bp, synthetic construct; identical to SEQ ID NO: 8542
  misc_feature 1..39: note = Synthetic construct
  source 1..39: mol_type = other DNA

SEQ ID NO: 12459 - DNA, 36 bp, synthetic construct; identical to SEQ ID NO: 8543
  misc_feature 1..36: note = Synthetic construct
  source 1..36: mol_type = other DNA

SEQ ID NO: 12460 - DNA, 33 bp, synthetic construct; identical to SEQ ID NO: 8544
  misc_feature 1..33: note = Synthetic construct
  source 1..33: mol_type = other DNA

SEQ ID NO: 12461 - DNA, 33 bp, synthetic construct; identical to SEQ ID NO: 8545
  misc_feature 1..33: note = Synthetic construct
  source 1..33: mol_type = other DNA

SEQ ID NO: 12462 - DNA, 33 bp, synthetic construct; identical to SEQ ID NO: 8546
  misc_feature 1..33: note = Synthetic construct
  source 1..33: mol_type = other DNA

SEQ ID NO: 12463 - DNA, 39 bp, synthetic construct; identical to SEQ ID NO: 8547
  misc_feature 1..39: note = Synthetic construct
  source 1..39: mol_type = other DNA

SEQ ID NO: 12464 - DNA, 30 bp, synthetic construct; identical to SEQ ID NO: 8548
  misc_feature 1..30: note = Synthetic construct
  source 1..30: mol_type = other DNA

SEQ ID NO: 12465 - DNA, 33 bp, synthetic construct; identical to SEQ ID NO: 8549
  misc_feature 1..33: note = Synthetic construct
  source 1..33: mol_type = other DNA

SEQ ID NO: 12466 - DNA, 39 bp, synthetic construct; identical to SEQ ID NO: 8550
  misc_feature 1..39: note = Synthetic construct
  source 1..39: mol_type = other DNA

SEQ ID NO: 12467 - DNA, 42 bp, synthetic construct; identical to SEQ ID NO: 8551
  misc_feature 1..42: note = Synthetic construct
  source 1..42: mol_type = other DNA

SEQ ID NO: 12468 - DNA, 30 bp, synthetic construct; identical to SEQ ID NO: 8552
  misc_feature 1..30: note = Synthetic construct
  source 1..30: mol_type = other DNA

SEQ ID NO: 12469 - DNA, 39 bp, synthetic construct; identical to SEQ ID NO: 8553
  misc_feature 1..39: note = Synthetic construct
  source 1..39: mol_type = other DNA

SEQ ID NO: 12470 - DNA, 33 bp, synthetic construct; identical to SEQ ID NO: 8554
  misc_feature 1..33: note = Synthetic construct
  source 1..33: mol_type = other DNA

SEQ ID NO: 12471 - DNA, 33 bp, synthetic construct; identical to SEQ ID NO: 8555
  misc_feature 1..33: note = Synthetic construct
  source 1..33: mol_type = other DNA

SEQ ID NO: 12472 - DNA, 30 bp, synthetic construct; identical to SEQ ID NO: 8556
  misc_feature 1..30: note = Synthetic construct
  source 1..30: mol_type = other DNA

SEQ ID NO: 12473 - DNA, 33 bp, synthetic construct; identical to SEQ ID NO: 8557
  misc_feature 1..33: note = Synthetic construct
  source 1..33: mol_type = other DNA

SEQ ID NO: 12474 - DNA, 36 bp, synthetic construct; identical to SEQ ID NO: 8558
  misc_feature 1..36: note = Synthetic construct
  source 1..36: mol_type = other DNA

SEQ ID NO: 12475 - DNA, 42 bp, synthetic construct; identical to SEQ ID NO: 8559
  misc_feature 1..42: note = Synthetic construct
  source 1..42: mol_type = other DNA

SEQ ID NO: 12476 - DNA, 39 bp, synthetic construct; identical to SEQ ID NO: 8560
  misc_feature 1..39: note = Synthetic construct
  source 1..39: mol_type = other DNA

SEQ ID NO: 12477 - DNA, 36 bp, synthetic construct; identical to SEQ ID NO: 8561
  misc_feature 1..36: note = Synthetic construct
  source 1..36: mol_type = other DNA

SEQ ID NO: 12478 - DNA, 33 bp, synthetic construct; identical to SEQ ID NO: 8562
  misc_feature 1..33: note = Synthetic construct
  source 1..33: mol_type = other DNA

SEQ ID NO: 12479 - DNA, 45 bp, synthetic construct; identical to SEQ ID NO: 8563
  misc_feature 1..45: note = Synthetic construct
  source 1..45: mol_type = other DNA

SEQ ID NO: 12480 - DNA, 33 bp, synthetic construct; identical to SEQ ID NO: 8564
  misc_feature 1..33: note = Synthetic construct
  source 1..33: mol_type = other DNA

SEQ ID NO: 12481 - DNA, 33 bp, synthetic construct; identical to SEQ ID NO: 8566
  misc_feature 1..33: note = Synthetic construct
  source 1..33: mol_type = other DNA

SEQ ID NO: 12482 - DNA, 30 bp, synthetic construct; identical to SEQ ID NO: 8567
  misc_feature 1..30: note = Synthetic construct
  source 1..30: mol_type = other DNA

SEQ ID NO: 12483 - DNA, 30 bp, synthetic construct; identical to SEQ ID NO: 8568
  misc_feature 1..30: note = Synthetic construct
  source 1..30: mol_type = other DNA

SEQ ID NO: 12484 - DNA, 33 bp, synthetic construct; identical to SEQ ID NO: 1838
  misc_feature 1..33: note = Synthetic construct
  source 1..33: mol_type = other DNA

SEQ ID NO: 12485 - DNA, 39 bp, synthetic construct; identical to SEQ ID NO: 8570
  misc_feature 1..39: note = Synthetic construct
  source 1..39: mol_type = other DNA

SEQ ID NO: 12486 - DNA, 39 bp, synthetic construct; identical to SEQ ID NO: 8571
  misc_feature 1..39: note = Synthetic construct
  source 1..39: mol_type = other DNA

SEQ ID NO: 12487 - DNA, 39 bp, synthetic construct; identical to SEQ ID NO: 8572
  misc_feature 1..39: note = Synthetic construct
  source 1..39: mol_type = other DNA

SEQ ID NO: 12488 - DNA, 39 bp, synthetic construct; identical to SEQ ID NO: 8573
  misc_feature 1..39: note = Synthetic construct
  source 1..39: mol_type = other DNA

SEQ ID NO: 12489 - DNA, 36 bp, synthetic construct; identical to SEQ ID NO: 8574
  misc_feature 1..36: note = Synthetic construct
  source 1..36: mol_type = other DNA

SEQ ID NO: 12490 - DNA, 33 bp, synthetic construct; identical to SEQ ID NO: 8575
  misc_feature 1..33: note = Synthetic construct
  source 1..33: mol_type = other DNA

SEQ ID NO: 12491 - DNA, 33 bp, synthetic construct; identical to SEQ ID NO: 8576
  misc_feature 1..33: note = Synthetic construct
  source 1..33: mol_type = other DNA

SEQ ID NO: 12492 - DNA, 33 bp, synthetic construct; identical to SEQ ID NO: 8577
  misc_feature 1..33: note = Synthetic construct
  source 1..33: mol_type = other DNA

SEQ ID NO: 12493 - DNA, 42 bp, synthetic construct; identical to SEQ ID NO: 8578
  misc_feature 1..42: note = Synthetic construct
  source 1..42: mol_type = other DNA

SEQ ID NO: 12494 - DNA, 33 bp, synthetic construct; identical to SEQ ID NO: 8579
  misc_feature 1..33: note = Synthetic construct
  source 1..33: mol_type = other DNA

SEQ ID NO: 12495 - DNA, 36 bp, synthetic construct; identical to SEQ ID NO: 8580
  misc_feature 1..36: note = Synthetic construct
  source 1..36: mol_type = other DNA

SEQ ID NO: 12496 - DNA, 33 bp, synthetic construct; identical to SEQ ID NO: 8581
  misc_feature 1..33: note = Synthetic construct
  source 1..33: mol_type = other DNA

SEQ ID NO: 12497 - DNA, 33 bp, synthetic construct; identical to SEQ ID NO: 8582
  misc_feature 1..33: note = Synthetic construct
  source 1..33: mol_type = other DNA

SEQ ID NO: 12498 - DNA, 36 bp, synthetic construct; identical to SEQ ID NO: 8583
  misc_feature 1..36: note = Synthetic construct
  source 1..36: mol_type = other DNA

SEQ ID NO: 12499 - DNA, 33 bp, synthetic construct; identical to SEQ ID NO: 8584
  misc_feature 1..33: note = Synthetic construct
  source 1..33: mol_type = other DNA

SEQ ID NO: 12500 - DNA, 36 bp, synthetic construct; identical to SEQ ID NO: 8585
  misc_feature 1..36: note = Synthetic construct
  source 1..36: mol_type = other DNA

SEQ ID NO: 12501 - DNA, 36 bp, synthetic construct; identical to SEQ ID NO: 8586
  misc_feature 1..36: note = Synthetic construct
  source 1..36: mol_type = other DNA

SEQ ID NO: 12502 - DNA, 33 bp, synthetic construct; identical to SEQ ID NO: 8587
  misc_feature 1..33: note = Synthetic construct
  source 1..33: mol_type = other DNA

SEQ ID NO: 12503 - DNA, 33 bp, synthetic construct; identical to SEQ ID NO: 8588
  misc_feature 1..33: note = Synthetic construct
  source 1..33: mol_type = other DNA

SEQ ID NO: 12504 - DNA, 36 bp, synthetic construct; identical to SEQ ID NO: 8589
  misc_feature 1..36: note = Synthetic construct
  source 1..36: mol_type = other DNA

SEQ ID NO: 12505 - DNA, 36 bp, synthetic construct; identical to SEQ ID NO: 8590
  misc_feature 1..36: note = Synthetic construct
  source 1..36: mol_type = other DNA

SEQ ID NO: 12506 - DNA, 33 bp, synthetic construct; identical to SEQ ID NO: 8591
  misc_feature 1..33: note = Synthetic construct
  source 1..33: mol_type = other DNA

SEQ ID NO: 12507 - DNA, 33 bp, synthetic construct; identical to SEQ ID NO: 8592
  misc_feature 1..33: note = Synthetic construct
  source 1..33: mol_type = other DNA

SEQ ID NO: 12508 - DNA, 33 bp, synthetic construct; identical to SEQ ID NO: 8593
  misc_feature 1..33: note = Synthetic construct
  source 1..33: mol_type = other DNA

SEQ ID NO: 12509 - DNA, 33 bp, synthetic construct; identical to SEQ ID NO: 8594
  misc_feature 1..33: note = Synthetic construct
  source 1..33: mol_type = other DNA

SEQ ID NO: 12510 - DNA, 33 bp, synthetic construct; identical to SEQ ID NO: 8595
  misc_feature 1..33: note = Synthetic construct
  source 1..33: mol_type = other DNA

SEQ ID NO: 12511 - DNA, 33 bp, synthetic construct; identical to SEQ ID NO: 8596
  misc_feature 1..33: note = Synthetic construct
  source 1..33: mol_type = other DNA

SEQ ID NO: 12512 - DNA, 33 bp, synthetic construct; identical to SEQ ID NO: 8597
  misc_feature 1..33: note = Synthetic construct
  source 1..33: mol_type = other DNA

SEQ ID NO: 12513 - DNA, 30 bp, synthetic construct; identical to SEQ ID NO: 8598
  misc_feature 1..30: note = Synthetic construct
  source 1..30: mol_type = other DNA

SEQ ID NO: 12514 - DNA, 33 bp, synthetic construct; identical to SEQ ID NO: 8599
  misc_feature 1..33: note = Synthetic construct
  source 1..33: mol_type = other DNA

SEQ ID NO: 12515 - DNA, 33 bp, synthetic construct; identical to SEQ ID NO: 8600
  misc_feature 1..33: note = Synthetic construct
  source 1..33: mol_type = other DNA

SEQ ID NO: 12516 - DNA, 33 bp, synthetic construct; identical to SEQ ID NO: 8601
  misc_feature 1..33: note = Synthetic construct
  source 1..33: mol_type = other DNA

SEQ ID NO: 12517 - DNA, 39 bp, synthetic construct; identical to SEQ ID NO: 8602
  misc_feature 1..39: note = Synthetic construct
  source 1..39: mol_type = other DNA

SEQ ID NO: 12518 - DNA, 33 bp, synthetic construct; identical to SEQ ID NO: 8603
  misc_feature 1..33: note = Synthetic construct
  source 1..33: mol_type = other DNA

SEQ ID NO: 12519 - DNA, 33 bp, synthetic construct; identical to SEQ ID NO: 8604
  misc_feature 1..33: note = Synthetic construct
  source 1..33: mol_type = other DNA

SEQ ID NO: 12520 - DNA, 36 bp, synthetic construct; identical to SEQ ID NO: 8605
  misc_feature 1..36: note = Synthetic construct
  source 1..36: mol_type = other DNA

SEQ ID NO: 12521 - DNA, 36 bp, synthetic construct; identical to SEQ ID NO: 8606
  misc_feature 1..36: note = Synthetic construct
  source 1..36: mol_type = other DNA

SEQ ID NO: 12522 - DNA, 36 bp, synthetic construct; identical to SEQ ID NO: 8607
  misc_feature 1..36: note = Synthetic construct
  source 1..36: mol_type = other DNA

SEQ ID NO: 12523 - DNA, 33 bp, synthetic construct; identical to SEQ ID NO: 8608
  misc_feature 1..33: note = Synthetic construct
  source 1..33: mol_type = other DNA

SEQ ID NO: 12524 - DNA, 30 bp, synthetic construct; identical to SEQ ID NO: 8609
  misc_feature 1..30: note = Synthetic construct
  source 1..30: mol_type = other DNA

SEQ ID NO: 12525 - DNA, 36 bp, synthetic construct; identical to SEQ ID NO: 8610
  misc_feature 1..36: note = Synthetic construct
  source 1..36: mol_type = other DNA

SEQ ID NO: 12526 - DNA, 33 bp, synthetic construct; identical to SEQ ID NO: 8611
  misc_feature 1..33: note = Synthetic construct
  source 1..33: mol_type = other DNA

SEQ ID NO: 12527 - DNA, 33 bp, synthetic construct; identical to SEQ ID NO: 8612
  misc_feature 1..33: note = Synthetic construct
  source 1..33: mol_type = other DNA

SEQ ID NO: 12528 - DNA, 30 bp, synthetic construct; identical to SEQ ID NO: 8613
  misc_feature 1..30: note = Synthetic construct
  source 1..30: mol_type = other DNA

SEQ ID NO: 12529 - DNA, 33 bp, synthetic construct; identical to SEQ ID NO: 8614
  misc_feature 1..33: note = Synthetic construct
  source 1..33: mol_type = other DNA

SEQ ID NO: 12530 - DNA, 33 bp, synthetic construct; identical to SEQ ID NO: 8615
  misc_feature 1..33: note = Synthetic construct
  source 1..33: mol_type = other DNA

SEQ ID NO: 12531 - DNA, 33 bp, synthetic construct; identical to SEQ ID NO: 8616
  misc_feature 1..33: note = Synthetic construct
  source 1..33: mol_type = other DNA

SEQ ID NO: 12532 - DNA, 33 bp, synthetic construct; identical to SEQ ID NO: 8617
  misc_feature 1..33: note = Synthetic construct
  source 1..33: mol_type = other DNA

SEQ ID NO: 12533 - DNA, 33 bp, synthetic construct; identical to SEQ ID NO: 8618
  misc_feature 1..33: note = Synthetic construct
  source 1..33: mol_type = other DNA

SEQ ID NO: 12534 - DNA, 39 bp, synthetic construct; identical to SEQ ID NO: 8619
  misc_feature 1..39: note = Synthetic construct
  source 1..39: mol_type = other DNA

SEQ ID NO: 12535 - DNA, 39 bp, synthetic construct; identical to SEQ ID NO: 8620
  misc_feature 1..39: note = Synthetic construct
  source 1..39: mol_type = other DNA

SEQ ID NO: 12536 - DNA, 36 bp, synthetic construct; identical to SEQ ID NO: 8621
  misc_feature 1..36: note = Synthetic construct
  source 1..36: mol_type = other DNA

SEQ ID NO: 12537 - DNA, 39 bp, synthetic construct; identical to SEQ ID NO: 8622
  misc_feature 1..39: note = Synthetic construct
  source 1..39: mol_type = other DNA

SEQ ID NO: 12538 - DNA, 39 bp, synthetic construct; identical to SEQ ID NO: 8623
  misc_feature 1..39: note = Synthetic construct
  source 1..39: mol_type = other DNA

SEQ ID NO: 12539 - DNA, 39 bp, synthetic construct; identical to SEQ ID NO: 8624
  misc_feature 1..39: note = Synthetic construct
  source 1..39: mol_type = other DNA

SEQ ID NO: 12540 - DNA, 39 bp, synthetic construct; identical to SEQ ID NO: 8625
  misc_feature 1..39: note = Synthetic construct
  source 1..39: mol_type = other DNA

SEQ ID NO: 12541 - DNA, 39 bp, synthetic construct; identical to SEQ ID NO: 8626
  misc_feature 1..39: note = Synthetic construct
  source 1..39: mol_type = other DNA

SEQ ID NO: 12542 - DNA, 39 bp, synthetic construct; identical to SEQ ID NO: 8627
  misc_feature 1..39: note = Synthetic construct
  source 1..39: mol_type = other DNA

SEQ ID NO: 12543 - DNA, 39 bp, synthetic construct; identical to SEQ ID NO: 8628
  misc_feature 1..39: note = Synthetic construct
  source 1..39: mol_type = other DNA

SEQ ID NO: 12544 - DNA, 33 bp, synthetic construct; identical to SEQ ID NO: 8629
  misc_feature 1..33: note = Synthetic construct
  source 1..33: mol_type = other DNA

SEQ ID NO: 12545 - DNA, 33 bp, synthetic construct; identical to SEQ ID NO: 8630
  misc_feature 1..33: note = Synthetic construct
  source 1..33: mol_type = other DNA

SEQ ID NO: 12546 - DNA, 33 bp, synthetic construct; identical to SEQ ID NO: 8631
  misc_feature 1..33: note = Synthetic construct
  source 1..33: mol_type = other DNA

SEQ ID NO: 12547 - DNA, 30 bp, synthetic construct; identical to SEQ ID NO: 8632
  misc_feature 1..30: note = Synthetic construct
  source 1..30: mol_type = other DNA

SEQ ID NO: 12548 - DNA, 30 bp, synthetic construct; identical to SEQ ID NO: 8633
  misc_feature 1..30: note = Synthetic construct
  source 1..30: mol_type = other DNA

SEQ ID NO: 12549 - DNA, 36 bp, synthetic construct; identical to SEQ ID NO: 8634
  misc_feature 1..36: note = Synthetic construct
  source 1..36: mol_type = other DNA

SEQ ID NO: 12550 - DNA, 42 bp, synthetic construct; identical to SEQ ID NO: 8635
  misc_feature 1..42: note = Synthetic construct
  source 1..42: mol_type = other DNA

SEQ ID NO: 12551 - DNA, 39 bp, synthetic construct; identical to SEQ ID NO: 8636
  misc_feature 1..39: note = Synthetic construct
  source 1..39: mol_type = other DNA

SEQ ID NO: 12552 - DNA, 33 bp, synthetic construct; identical to SEQ ID NO: 8637
  misc_feature 1..33: note = Synthetic construct
  source 1..33: mol_type = other DNA

SEQ ID NO: 12553 - DNA, 39 bp, synthetic construct; identical to SEQ ID NO: 8638
  misc_feature 1..39: note = Synthetic construct
  source 1..39: mol_type = other DNA

SEQ ID NO: 12554 - DNA, 33 bp, synthetic construct; identical to SEQ ID NO: 8639
  misc_feature 1..33: note = Synthetic construct
  source 1..33: mol_type = other DNA

SEQ ID NO: 12555 - DNA, 36 bp, synthetic construct; identical to SEQ ID NO: 8640
  misc_feature 1..36: note = Synthetic construct
  source 1..36: mol_type = other DNA

SEQ ID NO: 12556 - DNA, 33 bp, synthetic construct; identical to SEQ ID NO: 8641
  misc_feature 1..33: note = Synthetic construct
  source 1..33: mol_type = other DNA

SEQ ID NO: 12557 - DNA, 42 bp, synthetic construct; identical to SEQ ID NO: 8642
  misc_feature 1..42: note = Synthetic construct
  source 1..42: mol_type = other DNA

SEQ ID NO: 12558 - DNA, 33 bp, synthetic construct; identical to SEQ ID NO: 8643
  misc_feature 1..33: note = Synthetic construct
  source 1..33: mol_type = other DNA

SEQ ID NO: 12559 - DNA, 36 bp, synthetic construct; identical to SEQ ID NO: 8644
  misc_feature 1..36: note = Synthetic construct
  source 1..36: mol_type = other DNA

SEQ ID NO: 12560 - DNA, 33 bp, synthetic construct; identical to SEQ ID NO: 8645
  misc_feature 1..33: note = Synthetic construct
  source 1..33: mol_type = other DNA

SEQ ID NO: 12561 - DNA, 39 bp, synthetic construct; identical to SEQ ID NO: 8647
  misc_feature 1..39: note = Synthetic construct
  source 1..39: mol_type = other DNA

SEQ ID NO: 12562 - DNA, 39 bp, synthetic construct; identical to SEQ ID NO: 8648
  misc_feature 1..39: note = Synthetic construct
  source 1..39: mol_type = other DNA

SEQ ID NO: 12563 - DNA, 39 bp, synthetic construct; identical to SEQ ID NO: 8649
  misc_feature 1..39: note = Synthetic construct
  source 1..39: mol_type = other DNA

SEQ ID NO: 12564 - DNA, 39 bp, synthetic construct; identical to SEQ ID NO: 8650
  misc_feature 1..39: note = Synthetic construct
  source 1..39: mol_type = other DNA

SEQ ID NO: 12565 - DNA, 33 bp, synthetic construct; identical to SEQ ID NO: 8651
  misc_feature 1..33: note = Synthetic construct
  source 1..33: mol_type = other DNA

SEQ ID NO: 12566 - DNA, 33 bp, synthetic construct; identical to SEQ ID NO: 8652
  misc_feature 1..33: note = Synthetic construct
  source 1..33: mol_type = other DNA

SEQ ID NO: 12567 - DNA, 33 bp, synthetic construct; identical to SEQ ID NO: 8653
  misc_feature 1..33: note = Synthetic construct
  source 1..33: mol_type = other DNA

SEQ ID NO: 12568 - DNA, 42 bp, synthetic construct; identical to SEQ ID NO: 8654
  misc_feature 1..42: note = Synthetic construct
  source 1..42: mol_type = other DNA

SEQ ID NO: 12569 - DNA, 33 bp, synthetic construct; identical to SEQ ID NO: 8655
  misc_feature 1..33: note = Synthetic construct
  source 1..33: mol_type = other DNA

SEQ ID NO: 12570 - DNA, 33 bp, synthetic construct; identical to SEQ ID NO: 8656
  misc_feature 1..33: note = Synthetic construct
  source 1..33: mol_type = other DNA

SEQ ID NO: 12571 - DNA, 33 bp, synthetic construct; identical to SEQ ID NO: 8657
  misc_feature 1..33: note = Synthetic construct
  source 1..33: mol_type = other DNA

SEQ ID NO: 12572 - DNA, 33 bp, synthetic construct; identical to SEQ ID NO: 8658
  misc_feature 1..33: note = Synthetic construct
  source 1..33: mol_type = other DNA

SEQ ID NO: 12573 - DNA, 39 bp, synthetic construct; identical to SEQ ID NO: 8659
  misc_feature 1..39: note = Synthetic construct
  source 1..39: mol_type = other DNA

SEQ ID NO: 12574 - DNA, 30 bp, synthetic construct; identical to SEQ ID NO: 8660
  misc_feature 1..30: note = Synthetic construct
  source 1..30: mol_type = other DNA

SEQ ID NO: 12575 - DNA, 36 bp, synthetic construct; identical to SEQ ID NO: 8661
  misc_feature 1..36: note = Synthetic construct
  source 1..36: mol_type = other DNA

SEQ ID NO: 12576 - DNA, 33 bp, synthetic construct; identical to SEQ ID NO: 8662
  misc_feature 1..33: note = Synthetic construct
  source 1..33: mol_type = other DNA

SEQ ID NO: 12577 - DNA, 36 bp, synthetic construct; identical to SEQ ID NO: 8663
  misc_feature 1..36: note = Synthetic construct
  source 1..36: mol_type = other DNA

SEQ ID NO: 12578 - DNA, 30 bp, synthetic construct; identical to SEQ ID NO: 8664
  misc_feature 1..30: note = Synthetic construct
  source 1..30: mol_type = other DNA

SEQ ID NO: 12579 - DNA, 39 bp, synthetic construct; identical to SEQ ID NO: 8665
  misc_feature 1..39: note = Synthetic construct
  source 1..39: mol_type = other DNA

SEQ ID NO: 12580 - DNA, 33 bp, synthetic construct; identical to SEQ ID NO: 8666
  misc_feature 1..33: note = Synthetic construct
  source 1..33: mol_type = other DNA

SEQ ID NO: 12581 - DNA, 42 bp, synthetic construct; identical to SEQ ID NO: 8667
  misc_feature 1..42: note = Synthetic construct
  source 1..42: mol_type = other DNA

SEQ ID NO: 12582 - DNA, 36 bp, synthetic construct; identical to SEQ ID NO: 8668
  misc_feature 1..36: note = Synthetic construct
  source 1..36: mol_type = other DNA

SEQ ID NO: 12583 - DNA, 33 bp, synthetic construct; identical to SEQ ID NO: 8669
  misc_feature 1..33: note = Synthetic construct
  source 1..33: mol_type = other DNA

SEQ ID NO: 12584 - DNA, 42 bp, synthetic construct; identical to SEQ ID NO: 8670
  misc_feature 1..42: note = Synthetic construct
  source 1..42: mol_type = other DNA

SEQ ID NO: 12585 - DNA, 33 bp, synthetic construct; identical to SEQ ID NO: 8671
  misc_feature 1..33: note = Synthetic construct
  source 1..33: mol_type = other DNA

SEQ ID NO: 12586 - DNA, 39 bp, synthetic construct; identical to SEQ ID NO: 8672
  misc_feature 1..39: note = Synthetic construct
  source 1..39: mol_type = other DNA

SEQ ID NO: 12587 - DNA, 33 bp, synthetic construct; identical to SEQ ID NO: 8673
  misc_feature 1..33: note = Synthetic construct
  source 1..33: mol_type = other DNA

SEQ ID NO: 12588 - DNA, 39 bp, synthetic construct; identical to SEQ ID NO: 8674
  misc_feature 1..39: note = Synthetic construct
  source 1..39: mol_type = other DNA

SEQ ID NO: 12589 - DNA, 33 bp, synthetic construct; identical to SEQ ID NO: 8675
  misc_feature 1..33: note = Synthetic construct
  source 1..33: mol_type = other DNA

SEQ ID NO: 12590 - DNA, 36 bp, synthetic construct; identical to SEQ ID NO: 8676
  misc_feature 1..36: note = Synthetic construct
  source 1..36: mol_type = other DNA

SEQ ID NO: 12591 - DNA, 36 bp, synthetic construct; identical to SEQ ID NO: 8677
  misc_feature 1..36: note = Synthetic construct
  source 1..36: mol_type = other DNA

SEQ ID NO: 12592 - DNA, 30 bp, synthetic construct; identical to SEQ ID NO: 8678
  misc_feature 1..30: note = Synthetic construct
  source 1..30: mol_type = other DNA

SEQ ID NO: 12593 - DNA, 33 bp, synthetic construct; identical to SEQ ID NO: 8679
  misc_feature 1..33: note = Synthetic construct
  source 1..33: mol_type = other DNA

SEQ ID NO: 12594 - DNA, 33 bp, synthetic construct; identical to SEQ ID NO: 8680
  misc_feature 1..33: note = Synthetic construct
  source 1..33: mol_type = other DNA

SEQ ID NO: 12595 - DNA, 33 bp, synthetic construct; identical to SEQ ID NO: 8681
  misc_feature 1..33: note = Synthetic construct
  source 1..33: mol_type = other DNA

SEQ ID NO: 12596 - DNA, 36 bp, synthetic construct; identical to SEQ ID NO: 8682
  misc_feature 1..36: note = Synthetic construct
  source 1..36: mol_type = other DNA

SEQ ID NO: 12597 - DNA, 36 bp, synthetic construct; identical to SEQ ID NO: 8683
  misc_feature 1..36: note = Synthetic construct
  source 1..36: mol_type = other DNA

SEQ ID NO: 12598 - DNA, 42 bp, synthetic construct; identical to SEQ ID NO: 8684
  misc_feature 1..42: note = Synthetic construct
  source 1..42: mol_type = other DNA

SEQ ID NO: 12599 - DNA, 36 bp, synthetic construct; identical to SEQ ID NO: 8685
  misc_feature 1..36: note = Synthetic construct
  source 1..36: mol_type = other DNA

SEQ ID NO: 12600 - DNA, 36 bp, synthetic construct; identical to SEQ ID NO: 8686
  misc_feature 1..36: note = Synthetic construct
  source 1..36: mol_type = other DNA

SEQ ID NO: 12601 - DNA, 33 bp, synthetic construct; identical to SEQ ID NO: 8687
  misc_feature 1..33: note = Synthetic construct
  source 1..33: mol_type = other DNA

SEQ ID NO: 12602 - DNA, 33 bp, synthetic construct; identical to SEQ ID NO: 8688
  misc_feature 1..33: note = Synthetic construct
  source 1..33: mol_type = other DNA

SEQ ID NO: 12603 - DNA, 33 bp, synthetic construct; identical to SEQ ID NO: 8689
  misc_feature 1..33: note = Synthetic construct
  source 1..33: mol_type = other DNA

SEQ ID NO: 12604 - DNA, 30 bp, synthetic construct; identical to SEQ ID NO: 8691
  misc_feature 1..30: note = Synthetic construct
  source 1..30: mol_type = other DNA

SEQ ID NO: 12605 - DNA, 39 bp, synthetic construct; identical to SEQ ID NO: 8692
  misc_feature 1..39: note = Synthetic construct
  source 1..39: mol_type = other DNA

SEQ ID NO: 12606 - DNA, 33 bp, synthetic construct; identical to SEQ ID NO: 8693
  misc_feature 1..33: note = Synthetic construct
  source 1..33: mol_type = other DNA

SEQ ID NO: 12607 - DNA, 33 bp, synthetic construct; identical to SEQ ID NO: 8694
  misc_feature 1..33: note = Synthetic construct
  source 1..33: mol_type = other DNA

SEQ ID NO: 12608 - DNA, 30 bp, synthetic construct; identical to SEQ ID NO: 8695
  misc_feature 1..30: note = Synthetic construct
  source 1..30: mol_type = other DNA

SEQ ID NO: 12609 - DNA, 33 bp, synthetic construct; identical to SEQ ID NO: 8696
  misc_feature 1..33: note = Synthetic construct
  source 1..33: mol_type = other DNA

SEQ ID NO: 12610 - DNA, 36 bp, synthetic construct; identical to SEQ ID NO: 8697
  misc_feature 1..36: note = Synthetic construct
  source 1..36: mol_type = other DNA

SEQ ID NO: 12611 - DNA, 39 bp, synthetic construct; identical to SEQ ID NO: 8698
  misc_feature 1..39: note = Synthetic construct
  source 1..39: mol_type = other DNA

SEQ ID NO: 12612 - DNA, 36 bp, synthetic construct; identical to SEQ ID NO: 8699
  misc_feature 1..36: note = Synthetic construct
  source 1..36: mol_type = other DNA

SEQ ID NO: 12613 - DNA, 33 bp, synthetic construct; identical to SEQ ID NO: 8700
  misc_feature 1..33: note = Synthetic construct
  source 1..33: mol_type = other DNA

SEQ ID NO: 12614 - DNA, 33 bp, synthetic construct; identical to SEQ ID NO: 8701
  misc_feature 1..33: note = Synthetic construct
  source 1..33: mol_type = other DNA

SEQ ID NO: 12615 - DNA, 33 bp, synthetic construct; identical to SEQ ID NO: 8702
  misc_feature 1..33: note = Synthetic construct
  source 1..33: mol_type = other DNA

SEQ ID NO: 12616 - DNA, 39 bp, synthetic construct; identical to SEQ ID NO: 8703
  misc_feature 1..39: note = Synthetic construct
  source 1..39: mol_type = other DNA

SEQ ID NO: 12617 - DNA, 36 bp, synthetic construct; identical to SEQ ID NO: 8704
  misc_feature 1..36: note = Synthetic construct
  source 1..36: mol_type = other DNA

SEQ ID NO: 12618 - DNA, 36 bp, synthetic construct; identical to SEQ ID NO: 8705
  misc_feature 1..36: note = Synthetic construct
  source 1..36: mol_type = other DNA

SEQ ID NO: 12619 - DNA, 33 bp, synthetic construct; identical to SEQ ID NO: 8706
  misc_feature 1..33: note = Synthetic construct
  source 1..33: mol_type = other DNA

SEQ ID NO: 12620 - DNA, 36 bp, synthetic construct; identical to SEQ ID NO: 8707
  misc_feature 1..36: note = Synthetic construct
  source 1..36: mol_type = other DNA

SEQ ID NO: 12621 - DNA, 33 bp, synthetic construct; identical to SEQ ID NO: 8708
  misc_feature 1..33: note = Synthetic construct
  source 1..33: mol_type = other DNA

SEQ ID NO: 12622 - DNA, 33 bp, synthetic construct; identical to SEQ ID NO: 8709
  misc_feature 1..33: note = Synthetic construct
  source 1..33: mol_type = other DNA

SEQ ID NO: 12623 - DNA, 33 bp, synthetic construct; identical to SEQ ID NO: 8710
  misc_feature 1..33: note = Synthetic construct
  source 1..33: mol_type = other DNA

SEQ ID NO: 12624 - DNA, 39 bp, synthetic construct; identical to SEQ ID NO: 8711
  misc_feature 1..39: note = Synthetic construct
  source 1..39: mol_type = other DNA

SEQ ID NO: 12625 - DNA, 36 bp, synthetic construct; identical to SEQ ID NO: 8712
  misc_feature 1..36: note = Synthetic construct
  source 1..36: mol_type = other DNA

SEQ ID NO: 12626 - DNA, 33 bp, synthetic construct; identical to SEQ ID NO: 8713
  misc_feature 1..33: note = Synthetic construct
  source 1..33: mol_type = other DNA

SEQ ID NO: 12627 - DNA, 33 bp, synthetic construct; identical to SEQ ID NO: 8714
  misc_feature 1..33: note = Synthetic construct
  source 1..33: mol_type = other DNA

SEQ ID NO: 12628 - DNA, 33 bp, synthetic construct; identical to SEQ ID NO: 8715
  misc_feature 1..33: note = Synthetic construct
  source 1..33: mol_type = other DNA

SEQ ID NO: 12629 - DNA, 39 bp, synthetic construct; identical to SEQ ID NO: 8716
  misc_feature 1..39: note = Synthetic construct
  source 1..39: mol_type = other DNA

SEQ ID NO: 12630 - DNA, 33 bp, synthetic construct; identical to SEQ ID NO: 8717
  misc_feature 1..33: note = Synthetic construct
  source 1..33: mol_type = other DNA

SEQ ID NO: 12631 - DNA, 39 bp, synthetic construct; identical to SEQ ID NO: 8718
  misc_feature 1..39: note = Synthetic construct
  source 1..39: mol_type = other DNA

SEQ ID NO: 12632 - DNA, 36 bp, synthetic construct; identical to SEQ ID NO: 8719
  misc_feature 1..36: note = Synthetic construct
  source 1..36: mol_type = other DNA

SEQ ID NO: 12633 - DNA, 39 bp, synthetic construct; identical to SEQ ID NO: 8720
  misc_feature 1..39: note = Synthetic construct
  source 1..39: mol_type = other DNA

SEQ ID NO: 12634 - DNA, 33 bp, synthetic construct; identical to SEQ ID NO: 8721
  misc_feature 1..33: note = Synthetic construct
  source 1..33: mol_type = other DNA

SEQ ID NO: 12635 - DNA, 33 bp, synthetic construct; identical to SEQ ID NO: 8722
  misc_feature 1..33: note = Synthetic construct
  source 1..33: mol_type = other DNA

SEQ ID NO: 12636 - DNA, 33 bp, synthetic construct; identical to SEQ ID NO: 8723
  misc_feature 1..33: note = Synthetic construct
  source 1..33: mol_type = other DNA

SEQ ID NO: 12637 - DNA, 39 bp, synthetic construct; identical to SEQ ID NO: 8724
  misc_feature 1..39: note = Synthetic construct
  source 1..39: mol_type = other DNA

SEQ ID NO: 12638 - DNA, 36 bp, synthetic construct; identical to SEQ ID NO: 8725
  misc_feature 1..36: note = Synthetic construct
  source 1..36: mol_type = other DNA

SEQ ID NO: 12639 - DNA, 36 bp, synthetic construct; identical to SEQ ID NO: 8726
  misc_feature 1..36: note = Synthetic construct
  source 1..36: mol_type = other DNA

SEQ ID NO: 12640 - DNA, 39 bp, synthetic construct; identical to SEQ ID NO: 8727
  misc_feature 1..39: note = Synthetic construct
  source 1..39: mol_type = other DNA

SEQ ID NO: 12641 - DNA, 33 bp, synthetic construct; identical to SEQ ID NO: 8728
  misc_feature 1..33: note = Synthetic construct
  source 1..33: mol_type = other DNA

SEQ ID NO: 12642 - DNA, 33 bp, synthetic construct; identical to SEQ ID NO: 8729
  misc_feature 1..33: note = Synthetic construct
  source 1..33: mol_type = other DNA

SEQ ID NO: 12643 - DNA, 39 bp, synthetic construct; identical to SEQ ID NO: 8730
  misc_feature 1..39: note = Synthetic construct
  source 1..39: mol_type = other DNA

SEQ ID NO: 12644 - DNA, 33 bp, synthetic construct; identical to SEQ ID NO: 8731
  misc_feature 1..33: note = Synthetic construct
  source 1..33: mol_type = other DNA

SEQ ID NO: 12645 - DNA, 33 bp, synthetic construct; identical to SEQ ID NO: 8732
  misc_feature 1..33: note = Synthetic construct
  source 1..33: mol_type = other DNA

SEQ ID NO: 12646 - DNA, 33 bp, synthetic construct; identical to SEQ ID NO: 8733
  misc_feature 1..33: note = Synthetic construct
  source 1..33: mol_type = other DNA

SEQ ID NO: 12647 - DNA, 39 bp, synthetic construct; identical to SEQ ID NO: 8734
  misc_feature 1..39: note = Synthetic construct
  source 1..39: mol_type = other DNA

SEQ ID NO: 12648 - DNA, 36 bp, synthetic construct; identical to SEQ ID NO: 8735
  misc_feature 1..36: note = Synthetic construct
  source 1..36: mol_type = other DNA

SEQ ID NO: 12649 - DNA, 33 bp, synthetic construct; identical to SEQ ID NO: 8736
  misc_feature 1..33: note = Synthetic construct
  source 1..33: mol_type = other DNA

SEQ ID NO: 12650 - DNA, 33 bp, synthetic construct; identical to SEQ ID NO: 8737
  misc_feature 1..33: note = Synthetic construct
  source 1..33: mol_type = other DNA

SEQ ID NO: 12651 - DNA, 36 bp, synthetic construct; identical to SEQ ID NO: 8738
  misc_feature 1..36: note = Synthetic construct
  source 1..36: mol_type = other DNA

SEQ ID NO: 12652 - DNA, 39 bp, synthetic construct; identical to SEQ ID NO: 8739
  misc_feature 1..39: note = Synthetic construct
  source 1..39: mol_type = other DNA

SEQ ID NO: 12653 - DNA, 33 bp, synthetic construct; identical to SEQ ID NO: 8740
  misc_feature 1..33: note = Synthetic construct
  source 1..33: mol_type = other DNA

SEQ ID NO: 12654 - DNA, 42 bp, synthetic construct; identical to SEQ ID NO: 8741
  misc_feature 1..42: note = Synthetic construct
  source 1..42: mol_type = other DNA

SEQ ID NO: 12655 - DNA, 33 bp, synthetic construct; identical to SEQ ID NO: 8742
  misc_feature 1..33: note = Synthetic construct
  source 1..33: mol_type = other DNA

SEQ ID NO: 12656 - DNA, 42 bp, synthetic construct; identical to SEQ ID NO: 8743
  misc_feature 1..42: note = Synthetic construct
  source 1..42: mol_type = other DNA

SEQ ID NO: 12657 - DNA, 33 bp, synthetic construct; identical to SEQ ID NO: 8744
  misc_feature 1..33: note = Synthetic construct
  source 1..33: mol_type = other DNA

SEQ ID NO: 12658 - DNA, 39 bp, synthetic construct; identical to SEQ ID NO: 8745
  misc_feature 1..39: note = Synthetic construct
  source 1..39: mol_type = other DNA

SEQ ID NO: 12659 - DNA, 33 bp, synthetic construct; identical to SEQ ID NO: 8746
  misc_feature 1..33: note = Synthetic construct
  source 1..33: mol_type = other DNA

SEQ ID NO: 12660 - DNA, 33 bp, synthetic construct; identical to SEQ ID NO: 8747
  misc_feature 1..33: note = Synthetic construct
  source 1..33: mol_type = other DNA

SEQ ID NO: 12661 - DNA, 36 bp, synthetic construct; identical to SEQ ID NO: 8748
  misc_feature 1..36: note = Synthetic construct
  source 1..36: mol_type = other DNA

SEQ ID NO: 12662 - DNA, 39 bp, synthetic construct; identical to SEQ ID NO: 8749
  misc_feature 1..39: note = Synthetic construct
  source 1..39: mol_type = other DNA

SEQ ID NO: 12663 - DNA, 33 bp, synthetic construct; identical to SEQ ID NO: 8750
  misc_feature 1..33: note = Synthetic construct
  source 1..33: mol_type = other DNA

SEQ ID NO: 12664 - DNA, 33 bp, synthetic construct; identical to SEQ ID NO: 8751
  misc_feature 1..33: note = Synthetic construct
  source 1..33: mol_type = other DNA

SEQ ID NO: 12665 - DNA, 33 bp, synthetic construct; identical to SEQ ID NO: 8752
  misc_feature 1..33: note = Synthetic construct
  source 1..33: mol_type = other DNA

SEQ ID NO: 12666 - DNA, 21 bp, synthetic construct
  misc_feature 1..21: note = Synthetic construct
  source 1..21: mol_type = other DNA
tgtcaacaccttaggacgttc

SEQ ID NO: 12667 - DNA, 36 bp, synthetic construct; identical to SEQ ID NO: 8754
  misc_feature 1..36: note = Synthetic construct
  source 1..36: mol_type = other DNA

SEQ ID NO: 12668 - DNA, 33 bp, synthetic construct; identical to SEQ ID NO: 8755
  misc_feature 1..33: note = Synthetic construct
  source 1..33: mol_type = other DNA

SEQ ID NO: 12669 - DNA, 33 bp, synthetic construct; identical to SEQ ID NO: 8756
  misc_feature 1..33: note = Synthetic construct
  source 1..33: mol_type = other DNA

SEQ ID NO: 12670 - DNA, 33 bp, synthetic construct; identical to SEQ ID NO: 8757
  misc_feature 1..33: note = Synthetic construct
  source 1..33: mol_type = other DNA

SEQ ID NO: 12671 - DNA, 39 bp, synthetic construct; identical to SEQ ID NO: 8758
  misc_feature 1..39: note = Synthetic construct
  source 1..39: mol_type = other DNA

SEQ ID NO: 12672 - DNA, 36 bp, synthetic construct; identical to SEQ ID NO: 8759
  misc_feature 1..36: note = Synthetic construct
  source 1..36: mol_type = other DNA

SEQ ID NO: 12673 - DNA, 39 bp, synthetic construct; identical to SEQ ID NO: 8760
  misc_feature 1..39: note = Synthetic construct
  source 1..39: mol_type = other DNA

SEQ ID NO: 12674 - DNA, 39 bp, synthetic construct; identical to SEQ ID NO: 8761
  misc_feature 1..39: note = Synthetic construct
  source 1..39: mol_type = other DNA

SEQ ID NO: 12675 - DNA, 30 bp, synthetic construct; identical to SEQ ID NO: 8762
  misc_feature 1..30: note = Synthetic construct
  source 1..30: mol_type = other DNA

SEQ ID NO: 12676 - DNA, 33 bp, synthetic construct; identical to SEQ ID NO: 8763
  misc_feature 1..33: note = Synthetic construct
  source 1..33: mol_type = other DNA

SEQ ID NO: 12677 - DNA, 39 bp, synthetic construct; identical to SEQ ID NO: 8764
  misc_feature 1..39: note = Synthetic construct
  source 1..39: mol_type = other DNA

SEQ ID NO: 12678 - DNA, 33 bp, synthetic construct; identical to SEQ ID NO: 8765
  misc_feature 1..33: note = Synthetic construct
  source 1..33: mol_type = other DNA

SEQ ID NO: 12679 - DNA, 36 bp, synthetic construct; identical to SEQ ID NO: 8766
  misc_feature 1..36: note = Synthetic construct
  source 1..36: mol_type = other DNA

SEQ ID NO: 12680 - DNA, 42 bp, synthetic construct; identical to SEQ ID NO: 8767
  misc_feature 1..42: note = Synthetic construct
  source 1..42: mol_type = other DNA

SEQ ID NO: 12681 - DNA, 30 bp, synthetic construct; identical to SEQ ID NO: 8768
  misc_feature 1..30: note = Synthetic construct
  source 1..30: mol_type = other DNA

SEQ ID NO: 12682 - DNA, 42 bp, synthetic construct; identical to SEQ ID NO: 8769
  misc_feature 1..42: note = Synthetic construct
  source 1..42: mol_type = other DNA

SEQ ID NO: 12683 - DNA, 33 bp, synthetic construct; identical to SEQ ID NO: 8690
  misc_feature 1..33: note = Synthetic construct
  source 1..33: mol_type = other DNA

SEQ ID NO: 12684 - DNA, 39 bp, synthetic construct; identical to SEQ ID NO: 8770
  misc_feature 1..39: note = Synthetic construct
  source 1..39: mol_type = other DNA

SEQ ID NO: 12685 - DNA, 33 bp, synthetic construct; identical to SEQ ID NO: 8771
  misc_feature 1..33: note = Synthetic construct
  source 1..33: mol_type = other DNA

SEQ ID NO: 12686 - DNA, 42 bp, synthetic construct; identical to SEQ ID NO: 8772
  misc_feature 1..42: note = Synthetic construct
  source 1..42: mol_type = other DNA

SEQ ID NO: 12687 - DNA, 33 bp, synthetic construct; identical to SEQ ID NO: 8773
  misc_feature 1..33: note = Synthetic construct
  source 1..33: mol_type = other DNA

SEQ ID NO: 12688 - DNA, 30 bp, synthetic construct; identical to SEQ ID NO: 8774
  misc_feature 1..30: note = Synthetic construct
  source 1..30: mol_type = other DNA

SEQ ID NO: 12689 - DNA, 30 bp, synthetic construct; identical to SEQ ID NO: 8775
  misc_feature 1..30: note = Synthetic construct
  source 1..30: mol_type = other DNA

SEQ ID NO: 12690 - DNA, 33 bp, synthetic construct; identical to SEQ ID NO: 8776
  misc_feature 1..33: note = Synthetic construct
  source 1..33: mol_type = other DNA

SEQ ID NO: 12691 - DNA, 39 bp, synthetic construct; identical to SEQ ID NO: 8777
  misc_feature 1..39: note = Synthetic construct
  source 1..39: mol_type = other DNA

SEQ ID NO: 12692 - DNA, 39 bp, synthetic construct; identical to SEQ ID NO: 8778
  misc_feature 1..39: note = Synthetic construct
  source 1..39: mol_type = other DNA

SEQ ID NO: 12693 - DNA, 45 bp, synthetic construct; identical to SEQ ID NO: 8779
  misc_feature 1..45: note = Synthetic construct
  source 1..45: mol_type = other DNA

SEQ ID NO: 12694 - DNA, 33 bp, synthetic construct; identical to SEQ ID NO: 8780
  misc_feature 1..33: note = Synthetic construct
  source 1..33: mol_type = other DNA

SEQ ID NO: 12695 - DNA, 36 bp, synthetic construct; identical to SEQ ID NO: 8781
  misc_feature 1..36: note = Synthetic construct
  source 1..36: mol_type = other DNA

SEQ ID NO: 12696 - DNA, 27 bp, synthetic construct
  misc_feature 1..27: note = Synthetic construct
  source 1..27: mol_type = other DNA
tgccaacagtataatagttacactttt

SEQ ID NO: 12697 - DNA, 36 bp, synthetic construct; identical to SEQ ID NO: 8783
  misc_feature 1..36: note = Synthetic construct
  source 1..36: mol_type = other DNA

SEQ ID NO: 12698 - DNA, 33 bp, synthetic construct; identical to SEQ ID NO: 8784
  misc_feature 1..33: note = Synthetic construct
  source 1..33: mol_type = other DNA

SEQ ID NO: 12699 - DNA, 33 bp, synthetic construct; identical to SEQ ID NO: 8785
  misc_feature 1..33: note = Synthetic construct
  source 1..33: mol_type = other DNA

SEQ ID NO: 12700 - DNA, 33 bp, synthetic construct; identical to SEQ ID NO: 8786
  misc_feature 1..33: note = Synthetic construct
  source 1..33: mol_type = other DNA

SEQ ID NO: 12701 - DNA, 33 bp, synthetic construct; identical to SEQ ID NO: 8787
  misc_feature 1..33: note = Synthetic construct
  source 1..33: mol_type = other DNA

SEQ ID NO: 12702 - DNA, 33 bp, synthetic construct; identical to SEQ ID NO: 8788
  misc_feature 1..33: note = Synthetic construct
  source 1..33: mol_type = other DNA

SEQ ID NO: 12703 - DNA, 33 bp, synthetic construct; identical to SEQ ID NO: 8789
  misc_feature 1..33: note = Synthetic construct
  source 1..33: mol_type = other DNA

SEQ ID NO: 12704 - DNA, 33 bp, synthetic construct; identical to SEQ ID NO: 8790
  misc_feature 1..33: note = Synthetic construct
  source 1..33: mol_type = other DNA

SEQ ID NO: 12705 - DNA, 36 bp, synthetic construct; identical to SEQ ID NO: 8791
  misc_feature 1..36: note = Synthetic construct
  source 1..36: mol_type = other DNA

SEQ ID NO: 12706 - DNA, 36 bp, synthetic construct; identical to SEQ ID NO: 8792
  misc_feature 1..36: note = Synthetic construct
  source 1..36: mol_type = other DNA

SEQ ID NO: 12707 - DNA, 39 bp, synthetic construct; identical to SEQ ID NO: 8793
  misc_feature 1..39: note = Synthetic construct
  source 1..39: mol_type = other DNA

SEQ ID NO: 12708 - DNA, 30 bp, synthetic construct; identical to SEQ ID NO: 8794
  misc_feature 1..30: note = Synthetic construct
  source 1..30: mol_type = other DNA

SEQ ID NO: 12709 - DNA, 30 bp, synthetic construct; identical to SEQ ID NO: 8795
  misc_feature 1..30: note = Synthetic construct
  source 1..30: mol_type = other DNA

SEQ ID NO: 12710 - DNA, 33 bp, synthetic construct; identical to SEQ ID NO: 8796
  misc_feature 1..33: note = Synthetic construct
  source 1..33: mol_type = other DNA

SEQ ID NO: 12711 - DNA, 33 bp, synthetic construct; identical to SEQ ID NO: 8797
  misc_feature 1..33: note = Synthetic construct
  source 1..33: mol_type = other DNA

SEQ ID NO: 12712 - DNA, 33 bp, synthetic construct; identical to SEQ ID NO: 8798
  misc_feature 1..33: note = Synthetic construct
  source 1..33: mol_type = other DNA

SEQ ID NO: 12713 - DNA, 39 bp, synthetic construct; identical to SEQ ID NO: 8799
  misc_feature 1..39: note = Synthetic construct
  source 1..39: mol_type = other DNA

SEQ ID NO: 12714 - DNA, 36 bp, synthetic construct; identical to SEQ ID NO: 8800
  misc_feature 1..36: note = Synthetic construct
  source 1..36: mol_type = other DNA

SEQ ID NO: 12715 - DNA, 30 bp, synthetic construct; identical to SEQ ID NO: 8801
  misc_feature 1..30: note = Synthetic construct
  source 1..30: mol_type = other DNA

SEQ ID NO: 12716 - DNA, 33 bp, synthetic construct; identical to SEQ ID NO: 8802
  misc_feature 1..33: note = Synthetic construct
  source 1..33: mol_type = other DNA

SEQ ID NO: 12717 - DNA, 36 bp, synthetic construct; identical to SEQ ID NO: 8803
  misc_feature 1..36: note = Synthetic construct
  source 1..36: mol_type = other DNA

SEQ ID NO: 12718 - DNA, 36 bp, synthetic construct; identical to SEQ ID NO: 8804
  misc_feature 1..36: note = Synthetic construct
  source 1..36: mol_type = other DNA

SEQ ID NO: 12719 - DNA, 36 bp, synthetic construct; identical to SEQ ID NO: 8805
  misc_feature 1..36: note = Synthetic construct
  source 1..36: mol_type = other DNA

SEQ ID NO: 12720 - DNA, 36 bp, synthetic construct; identical to SEQ ID NO: 8806
  misc_feature 1..36: note = Synthetic construct
  source 1..36: mol_type = other DNA

SEQ ID NO: 12721 - DNA, 36 bp, synthetic construct; identical to SEQ ID NO: 8807
  misc_feature 1..36: note = Synthetic construct
  source 1..36: mol_type = other DNA

SEQ ID NO: 12722 - DNA, 33 bp, synthetic construct; identical to SEQ ID NO: 8808
  misc_feature 1..33: note = Synthetic construct
  source 1..33: mol_type = other DNA

SEQ ID NO: 12723 - DNA, 39 bp, synthetic construct; identical to SEQ ID NO: 8809
  misc_feature 1..39: note = Synthetic construct
  source 1..39: mol_type = other DNA

SEQ ID NO: 12724 - DNA, 36 bp, synthetic construct; identical to SEQ ID NO: 8810
  misc_feature 1..36: note = Synthetic construct
  source 1..36: mol_type = other DNA

SEQ ID NO: 12725 - DNA, 33 bp, synthetic construct; identical to SEQ ID NO: 8811
  misc_feature 1..33: note = Synthetic construct
  source 1..33: mol_type = other DNA

SEQ ID NO: 12726 - DNA, 36 bp, synthetic construct; identical to SEQ ID NO: 8812
  misc_feature 1..36: note = Synthetic construct
  source 1..36: mol_type = other DNA

SEQ ID NO: 12727 - DNA, 33 bp, synthetic construct; identical to SEQ ID NO: 8813
  misc_feature 1..33: note = Synthetic construct
  source 1..33: mol_type = other DNA

SEQ ID NO: 12728 - DNA, 33 bp, synthetic construct; identical to SEQ ID NO: 8814
  misc_feature 1..33: note = Synthetic construct
  source 1..33: mol_type = other DNA

SEQ ID NO: 12729 - DNA, 33 bp, synthetic construct; identical to SEQ ID NO: 8815
  misc_feature 1..33: note = Synthetic construct
  source 1..33: mol_type = other DNA

SEQ ID NO: 12730 - DNA, 39 bp, synthetic construct; identical to SEQ ID NO: 8816
  misc_feature 1..39: note = Synthetic construct
  source 1..39: mol_type = other DNA

SEQ ID NO: 12731 - DNA, 33 bp, synthetic construct; identical to SEQ ID NO: 8817
  misc_feature 1..33: note = Synthetic construct
  source 1..33: mol_type = other DNA

SEQ ID NO: 12732 - DNA, 33 bp, synthetic construct; identical to SEQ ID NO: 8818
  misc_feature 1..33: note = Synthetic construct
  source 1..33: mol_type = other DNA

SEQ ID NO: 12733 - DNA, 30 bp, synthetic construct; identical to SEQ ID NO: 8819
  misc_feature 1..30: note = Synthetic construct
  source 1..30: mol_type = other DNA

SEQ ID NO: 12734 - DNA, 36 bp, synthetic construct; identical to SEQ ID NO: 8820
  misc_feature 1..36: note = Synthetic construct
  source 1..36: mol_type = other DNA

SEQ ID NO: 12735 - DNA, 33 bp, synthetic construct; identical to SEQ ID NO: 8821
  misc_feature 1..33: note = Synthetic construct
  source 1..33: mol_type = other DNA

SEQ ID NO: 12736 - DNA, 33 bp, synthetic construct; identical to SEQ ID NO: 8822
  misc_feature 1..33: note = Synthetic construct
  source 1..33: mol_type = other DNA

SEQ ID NO: 12737 - DNA, 36 bp, synthetic construct; identical to SEQ ID NO: 8823
  misc_feature 1..36: note = Synthetic construct
  source 1..36: mol_type = other DNA

SEQ ID NO: 12738 - DNA, 33 bp, synthetic construct; identical to SEQ ID NO: 8824
  misc_feature 1..33: note = Synthetic construct
  source 1..33: mol_type = other DNA

SEQ ID NO: 12739 - DNA, 33 bp, synthetic construct; identical to SEQ ID NO: 8825
  misc_feature 1..33: note = Synthetic construct
  source 1..33: mol_type = other DNA

SEQ ID NO: 12740 - DNA, 36 bp, synthetic construct; identical to SEQ ID NO: 8827
  misc_feature 1..36: note = Synthetic construct
  source 1..36: mol_type = other DNA

SEQ ID NO: 12741 - DNA, 33 bp, synthetic construct; identical to SEQ ID NO: 8828
  misc_feature 1..33: note = Synthetic construct
  source 1..33: mol_type = other DNA

SEQ ID NO: 12742 - DNA, 33 bp, synthetic construct; identical to SEQ ID NO: 8829
  misc_feature 1..33: note = Synthetic construct
  source 1..33: mol_type = other DNA

SEQ ID NO: 12743 - DNA, 39 bp, synthetic construct; identical to SEQ ID NO: 8830
  misc_feature 1..39: note = Synthetic construct
  source 1..39: mol_type = other DNA

SEQ ID NO: 12744 - DNA, 36 bp, synthetic construct; identical to SEQ ID NO: 8831
  misc_feature 1..36: note = Synthetic construct
  source 1..36: mol_type = other DNA

SEQ ID NO: 12745 - DNA, 33 bp, synthetic construct; identical to SEQ ID NO: 8832
  misc_feature 1..33: note = Synthetic construct
  source 1..33: mol_type = other DNA

SEQ ID NO: 12746 - DNA, 36 bp, synthetic construct; identical to SEQ ID NO: 8833
  misc_feature 1..36: note = Synthetic construct
  source 1..36: mol_type = other DNA

SEQ ID NO: 12747 - DNA, 33 bp, synthetic construct; identical to SEQ ID NO: 8834
  misc_feature 1..33: note = Synthetic construct
  source 1..33: mol_type = other DNA

SEQ ID NO: 12748 - DNA, 33 bp, synthetic construct; identical to SEQ ID NO: 8836
  misc_feature 1..33: note = Synthetic construct
  source 1..33: mol_type = other DNA

SEQ ID NO: 12749 - DNA, 36 bp, synthetic construct; identical to SEQ ID NO: 8837
  misc_feature 1..36: note = Synthetic construct
  source 1..36: mol_type = other DNA

SEQ ID NO: 12750 - DNA, 36 bp, synthetic construct; identical to SEQ ID NO: 8838
  misc_feature 1..36: note = Synthetic construct
  source 1..36: mol_type = other DNA

SEQ ID NO: 12751 - DNA, 36 bp, synthetic construct; identical to SEQ ID NO: 8839
  misc_feature 1..36: note = Synthetic construct
  source 1..36: mol_type = other DNA

SEQ ID NO: 12752 - DNA, 36 bp, synthetic construct; identical to SEQ ID NO: 8840
  misc_feature 1..36: note = Synthetic construct
  source 1..36: mol_type = other DNA

SEQ ID NO: 12753 - DNA, 33 bp, synthetic construct; identical to SEQ ID NO: 8841
  misc_feature 1..33: note = Synthetic construct
  source 1..33: mol_type = other DNA

SEQ ID NO: 12754 - DNA, 36 bp, synthetic construct; identical to SEQ ID NO: 8842
  misc_feature 1..36: note = Synthetic construct
  source 1..36: mol_type = other DNA

SEQ ID NO: 12755 - DNA, 33 bp, synthetic construct; identical to SEQ ID NO: 8843
  misc_feature 1..33: note = Synthetic construct
  source 1..33: mol_type = other DNA

SEQ ID NO: 12756 - DNA, 33 bp, synthetic construct; identical to SEQ ID NO: 8844
  misc_feature 1..33: note = Synthetic construct
  source 1..33: mol_type = other DNA

SEQ ID NO: 12757 - DNA, 33 bp, synthetic construct; identical to SEQ ID NO: 8845
  misc_feature 1..33: note = Synthetic construct
  source 1..33: mol_type = other DNA

SEQ ID NO: 12758 - DNA, 33 bp, synthetic construct; identical to SEQ ID NO: 8846
  misc_feature 1..33: note = Synthetic construct
  source 1..33: mol_type = other DNA

SEQ ID NO: 12759 - DNA, 33 bp, synthetic construct; identical to SEQ ID NO: 1837
  misc_feature 1..33: note = Synthetic construct
  source 1..33: mol_type = other DNA

SEQ ID NO: 12760 - DNA, 33 bp, synthetic construct; identical to SEQ ID NO: 8848
  misc_feature 1..33: note = Synthetic construct
  source 1..33: mol_type = other DNA

SEQ ID NO: 12761 - DNA, 33 bp, synthetic construct; identical to SEQ ID NO: 8849
  misc_feature 1..33: note = Synthetic construct
  source 1..33: mol_type = other DNA

SEQ ID NO: 12762 - DNA, 39 bp, synthetic construct; identical to SEQ ID NO: 8850
  misc_feature 1..39: note = Synthetic construct
  source 1..39: mol_type = other DNA

SEQ ID NO: 12763 - DNA, 36 bp, synthetic construct; identical to SEQ ID NO: 8851
  misc_feature 1..36: note = Synthetic construct
  source 1..36: mol_type = other DNA

SEQ ID NO: 12764 - DNA, 33 bp, synthetic construct; identical to SEQ ID NO: 8852
  misc_feature 1..33: note = Synthetic construct
  source 1..33: mol_type = other DNA

SEQ ID NO: 12765 - DNA, 36 bp, synthetic construct; identical to SEQ ID NO: 8853
  misc_feature 1..36: note = Synthetic construct
  source 1..36: mol_type = other DNA

SEQ ID NO: 12766 - DNA, 33 bp, synthetic construct; identical to SEQ ID NO: 8854
  misc_feature 1..33: note = Synthetic construct
  source 1..33: mol_type = other DNA

SEQ ID NO: 12767 - DNA, 33 bp, synthetic construct; identical to SEQ ID NO: 8855
  misc_feature 1..33: note = Synthetic construct
  source 1..33: mol_type = other DNA

SEQ ID NO: 12768 - DNA, 33 bp, synthetic construct; identical to SEQ ID NO: 8856
  misc_feature 1..33: note = Synthetic construct
  source 1..33: mol_type = other DNA

SEQ ID NO: 12769 - DNA, 33 bp, synthetic construct; identical to SEQ ID NO: 8857
  misc_feature 1..33: note = Synthetic construct
  source 1..33: mol_type = other DNA

SEQ ID NO: 12770 - DNA, 33 bp, synthetic construct; identical to SEQ ID NO: 8858
  misc_feature 1..33: note = Synthetic construct
  source 1..33: mol_type = other DNA

SEQ ID NO: 12771 - DNA, 33 bp, synthetic construct; identical to SEQ ID NO: 8859
  misc_feature 1..33: note = Synthetic construct
  source 1..33: mol_type = other DNA

SEQ ID NO: 12772 - DNA, 33 bp, synthetic construct; identical to SEQ ID NO: 8860
  misc_feature 1..33: note = Synthetic construct
  source 1..33: mol_type = other DNA

SEQ ID NO: 12773 - DNA, 33 bp, synthetic construct; identical to SEQ ID NO: 8861
  misc_feature 1..33: note = Synthetic construct
  source 1..33: mol_type = other DNA

SEQ ID NO: 12774 - DNA, 33 bp, synthetic construct; identical to SEQ ID NO: 8862
  misc_feature 1..33: note = Synthetic construct
  source 1..33: mol_type = other DNA

SEQ ID NO: 12775 - DNA, 39 bp, synthetic construct; identical to SEQ ID NO: 8863
  misc_feature 1..39: note = Synthetic construct
  source 1..39: mol_type = other DNA

SEQ ID NO: 12776 - DNA, 36 bp, synthetic construct; identical to SEQ ID NO: 8864
  misc_feature 1..36: note = Synthetic construct
  source 1..36: mol_type = other DNA

SEQ ID NO: 12777 - DNA, 24 bp, synthetic construct
  misc_feature 1..24: note = Synthetic construct
  source 1..24: mol_type = other DNA
tgccaataccccccgaggacgttc

SEQ ID NO: 12778 - DNA, 36 bp, synthetic construct; identical to SEQ ID NO: 8866
  misc_feature 1..36: note = Synthetic construct
  source 1..36: mol_type = other DNA

SEQ ID NO: 12779 - DNA, 33 bp, synthetic construct; identical to SEQ ID NO: 8867
  misc_feature 1..33: note = Synthetic construct
  source 1..33: mol_type = other DNA

SEQ ID NO: 12780 - DNA, 42 bp, synthetic construct; identical to SEQ ID NO: 8868
  misc_feature 1..42: note = Synthetic construct
  source 1..42: mol_type = other DNA

SEQ ID NO: 12781 - DNA, 33 bp, synthetic construct; identical to SEQ ID NO: 8869
  misc_feature 1..33: note = Synthetic construct
  source 1..33: mol_type = other DNA

SEQ ID NO: 12782 - DNA, 33 bp, synthetic construct; identical to SEQ ID NO: 8870
  misc_feature 1..33: note = Synthetic construct
  source 1..33: mol_type = other DNA

SEQ ID NO: 12783 - DNA, 39 bp, synthetic construct; identical to SEQ ID NO: 8872
  misc_feature 1..39: note = Synthetic construct
  source 1..39: mol_type = other DNA

SEQ ID NO: 12784 - DNA, 36 bp, synthetic construct; identical to SEQ ID NO: 8873
  misc_feature 1..36: note = Synthetic construct
  source 1..36: mol_type = other DNA

SEQ ID NO: 12785 - DNA, 33 bp, synthetic construct; identical to SEQ ID NO: 8874
  misc_feature 1..33: note = Synthetic construct
  source 1..33: mol_type = other DNA

SEQ ID NO: 12786 - DNA, 42 bp, synthetic construct; identical to SEQ ID NO: 8875
  misc_feature 1..42: note = Synthetic construct
  source 1..42: mol_type = other DNA

SEQ ID NO: 12787 - DNA, 33 bp, synthetic construct; identical to SEQ ID NO: 8876
  misc_feature 1..33: note = Synthetic construct
  source 1..33: mol_type = other DNA

SEQ ID NO: 12788 - DNA, 36 bp, synthetic construct; identical to SEQ ID NO: 8877
  misc_feature 1..36: note = Synthetic construct
  source 1..36: mol_type = other DNA

SEQ ID NO: 12789 - DNA, 36 bp, synthetic construct; identical to SEQ ID NO: 8878
  misc_feature 1..36: note = Synthetic construct
  source 1..36: mol_type = other DNA

SEQ ID NO: 12790 - DNA, 39 bp, synthetic construct; identical to SEQ ID NO: 8879
  misc_feature 1..39: note = Synthetic construct
  source 1..39: mol_type = other DNA

SEQ ID NO: 12791 - DNA, 39 bp, synthetic construct; identical to SEQ ID NO: 8880
  misc_feature 1..39: note = Synthetic construct
  source 1..39: mol_type = other DNA

SEQ ID NO: 12792 - DNA, 33 bp, synthetic construct; identical to SEQ ID NO: 8881
  misc_feature 1..33: note = Synthetic construct
  source 1..33: mol_type = other DNA

SEQ ID NO: 12793 - DNA, 36 bp, synthetic construct; identical to SEQ ID NO: 8882
  misc_feature 1..36: note = Synthetic construct
  source 1..36: mol_type = other DNA

SEQ ID NO: 12794 - DNA, 30 bp, synthetic construct; identical to SEQ ID NO: 8883
  misc_feature 1..30: note = Synthetic construct
  source 1..30: mol_type = other DNA

SEQ ID NO: 12795 - DNA, 36 bp, synthetic construct; identical to SEQ ID NO: 8884
  misc_feature 1..36: note = Synthetic construct
  source 1..36: mol_type = other DNA

SEQ ID NO: 12796 - DNA, 36 bp, synthetic construct; identical to SEQ ID NO: 8885
  misc_feature 1..36: note = Synthetic construct
  source 1..36: mol_type = other DNA

SEQ ID NO: 12797 - DNA, 33 bp, synthetic construct; identical to SEQ ID NO: 8886
  misc_feature 1..33: note = Synthetic construct
  source 1..33: mol_type = other DNA

SEQ ID NO: 12798 - DNA, 36 bp, synthetic construct; identical to SEQ ID NO: 8887
  misc_feature 1..36: note = Synthetic construct
  source 1..36: mol_type = other DNA

SEQ ID NO: 12799 - DNA, 39 bp, synthetic construct; identical to SEQ ID NO: 8888
  misc_feature 1..39: note = Synthetic construct
  source 1..39: mol_type = other DNA

SEQ ID NO: 12800 - DNA, 30 bp, synthetic construct; identical to SEQ ID NO: 8889
  misc_feature 1..30: note = Synthetic construct
  source 1..30: mol_type = other DNA

SEQ ID NO: 12801 - DNA, 33 bp, synthetic construct; identical to SEQ ID NO: 8890
  misc_feature 1..33: note = Synthetic construct
  source 1..33: mol_type = other DNA

SEQ ID NO: 12802 - DNA, 36 bp, synthetic construct; identical to SEQ ID NO: 8892
  misc_feature 1..36: note = Synthetic construct
  source 1..36: mol_type = other DNA

SEQ ID NO: 12803 - DNA, 36 bp, synthetic construct; identical to SEQ ID NO: 8893
  misc_feature 1..36: note = Synthetic construct
  source 1..36: mol_type = other DNA

SEQ ID NO: 12804 - DNA, 33 bp, synthetic construct; identical to SEQ ID NO: 8894
  misc_feature 1..33: note = Synthetic construct
  source 1..33: mol_type = other DNA

SEQ ID NO: 12805 - DNA, 33 bp, synthetic construct; identical to SEQ ID NO: 8895
  misc_feature 1..33: note = Synthetic construct
  source 1..33: mol_type = other DNA

SEQ ID NO: 12806 - DNA, 36 bp, synthetic construct; identical to SEQ ID NO: 8896
  misc_feature 1..36: note = Synthetic construct
  source 1..36: mol_type = other DNA

SEQ ID NO: 12807 - DNA, 36 bp, synthetic construct; identical to SEQ ID NO: 8897
  misc_feature 1..36: note = Synthetic construct
  source 1..36: mol_type = other DNA

SEQ ID NO: 12808 - DNA, 36 bp, synthetic construct; identical to SEQ ID NO: 8898
  misc_feature 1..36: note = Synthetic construct
  source 1..36: mol_type = other DNA

SEQ ID NO: 12809 - DNA, 33 bp, synthetic construct; identical to SEQ ID NO: 8899
  misc_feature 1..33: note = Synthetic construct
  source 1..33: mol_type = other DNA

SEQ ID NO: 12810 - DNA, 33 bp, synthetic construct; identical to SEQ ID NO: 8900
  misc_feature 1..33: note = Synthetic construct
  source 1..33: mol_type = other DNA

SEQ ID NO: 12811 - DNA, 36 bp, synthetic construct; identical to SEQ ID NO: 8901
  misc_feature 1..36: note = Synthetic construct
  source 1..36: mol_type = other DNA

SEQ ID NO: 12812 - DNA, 39 bp, synthetic construct; identical to SEQ ID NO: 8902
  misc_feature 1..39: note = Synthetic construct
  source 1..39: mol_type = other DNA

SEQ ID NO: 12813 - DNA, 36 bp, synthetic construct; identical to SEQ ID NO: 8903
  misc_feature 1..36: note = Synthetic construct
  source 1..36: mol_type = other DNA

SEQ ID NO: 12814 - DNA, 30 bp, synthetic construct; identical to SEQ ID NO: 8904
  misc_feature 1..30: note = Synthetic construct
  source 1..30: mol_type = other DNA

SEQ ID NO: 12815 - DNA, 39 bp, synthetic construct; identical to SEQ ID NO: 8905
  misc_feature 1..39: note = Synthetic construct
  source 1..39: mol_type = other DNA

SEQ ID NO: 12816 - DNA, 36 bp, synthetic construct; identical to SEQ ID NO: 8906
  misc_feature 1..36: note = Synthetic construct
  source 1..36: mol_type = other DNA

SEQ ID NO: 12817 - DNA, 33 bp, synthetic construct; identical to SEQ ID NO: 8907
  misc_feature 1..33: note = Synthetic construct
  source 1..33: mol_type = other DNA

SEQ ID NO: 12818 - DNA, 39 bp, synthetic construct; identical to SEQ ID NO: 8908
  misc_feature 1..39: note = Synthetic construct
  source 1..39: mol_type = other DNA

SEQ ID NO: 12819 - DNA, 24 bp, synthetic construct
  misc_feature 1..24: note = Synthetic construct
  source 1..24: mol_type = other DNA
tgtcagcagcgtgacttcactttc

SEQ ID NO: 12820 - DNA, 33 bp, synthetic construct; identical to SEQ ID NO: 8910
  misc_feature 1..33: note = Synthetic construct
  source 1..33: mol_type = other DNA

SEQ ID NO: 12821 - DNA, 33 bp, synthetic construct; identical to SEQ ID NO: 8911
  misc_feature 1..33: note = Synthetic construct
  source 1..33: mol_type = other DNA

SEQ ID NO: 12822 - DNA, 36 bp, synthetic construct; identical to SEQ ID NO: 8912
  misc_feature 1..36: note = Synthetic construct
  source 1..36: mol_type = other DNA

SEQ ID NO: 12823 - DNA, 33 bp, synthetic construct; identical to SEQ ID NO: 8913
  misc_feature 1..33: note = Synthetic construct
  source 1..33: mol_type = other DNA

SEQ ID NO: 12824 - DNA, 39 bp, synthetic construct; identical to SEQ ID NO: 8914
  misc_feature 1..39: note = Synthetic construct
  source 1..39: mol_type = other DNA

SEQ ID NO: 12825 - DNA, 33 bp, synthetic construct; identical to SEQ ID NO: 8915
  misc_feature 1..33: note = Synthetic construct
  source 1..33: mol_type = other DNA

SEQ ID NO: 12826 - DNA, 33 bp, synthetic construct; identical to SEQ ID NO: 8916
  misc_feature 1..33: note = Synthetic construct
  source 1..33: mol_type = other DNA

SEQ ID NO: 12827 - DNA, 36 bp, synthetic construct; identical to SEQ ID NO: 8917
  misc_feature 1..36: note = Synthetic construct
  source 1..36: mol_type = other DNA

SEQ ID NO: 12828 - DNA, 33 bp, synthetic construct; identical to SEQ ID NO: 8918
  misc_feature 1..33: note = Synthetic construct
  source 1..33: mol_type = other DNA

SEQ ID NO: 12829 - DNA, 36 bp, synthetic construct; identical to SEQ ID NO: 8919
  misc_feature 1..36: note = Synthetic construct
  source 1..36: mol_type = other DNA

SEQ ID NO: 12830 - DNA, 33 bp, synthetic construct; identical to SEQ ID NO: 8920
  misc_feature 1..33: note = Synthetic construct
  source 1..33: mol_type = other DNA

SEQ ID NO: 12831 - DNA, 39 bp, synthetic construct; identical to SEQ ID NO: 8921
  misc_feature 1..39: note = Synthetic construct
  source 1..39: mol_type = other DNA

SEQ ID NO: 12832 - DNA, 33 bp, synthetic construct; identical to SEQ ID NO: 8922
  misc_feature 1..33: note = Synthetic construct
  source 1..33: mol_type = other DNA

SEQ ID NO: 12833 - DNA, 42 bp, synthetic construct; identical to SEQ ID NO: 8923
  misc_feature 1..42: note = Synthetic construct
  source 1..42: mol_type = other DNA

SEQ ID NO: 12834 - DNA, 33 bp, synthetic construct; identical to SEQ ID NO: 8924
  misc_feature 1..33: note = Synthetic construct
  source 1..33: mol_type = other DNA

SEQ ID NO: 12835 - DNA, 36 bp, synthetic construct; identical to SEQ ID NO: 8925
  misc_feature 1..36: note = Synthetic construct
  source 1..36: mol_type = other DNA

SEQ ID NO: 12836 - DNA, 33 bp, synthetic construct; identical to SEQ ID NO: 8926
  misc_feature 1..33: note = Synthetic construct
  source 1..33: mol_type = other DNA

SEQ ID NO: 12837 - DNA, 33 bp, synthetic construct; identical to SEQ ID NO: 8927
  misc_feature 1..33: note = Synthetic construct
  source 1..33: mol_type = other DNA

SEQ ID NO: 12838 - DNA, 33 bp, synthetic construct; identical to SEQ ID NO: 8928
  misc_feature 1..33: note = Synthetic construct
  source 1..33: mol_type = other DNA

SEQ ID NO: 12839 - DNA, 33 bp, synthetic construct; identical to SEQ ID NO: 8929
  misc_feature 1..33: note = Synthetic construct
  source 1..33: mol_type = other DNA

SEQ ID NO: 12840 - DNA, 30 bp, synthetic construct; identical to SEQ ID NO: 8930
  misc_feature 1..30: note = Synthetic construct
  source 1..30: mol_type = other DNA

SEQ ID NO: 12841 - DNA, 39 bp, synthetic construct; identical to SEQ ID NO: 8931
  misc_feature 1..39: note = Synthetic construct
  source 1..39: mol_type = other DNA

SEQ ID NO: 12842 - DNA, 33 bp, synthetic construct; identical to SEQ ID NO: 8932
  misc_feature 1..33: note = Synthetic construct
  source 1..33: mol_type = other DNA

SEQ ID NO: 12843 - DNA, 33 bp, synthetic construct; identical to SEQ ID NO: 8933
  misc_feature 1..33: note = Synthetic construct
  source 1..33: mol_type = other DNA

SEQ ID NO: 12844 - DNA, 33 bp, synthetic construct; identical to SEQ ID NO: 8934
  misc_feature 1..33: note = Synthetic construct
  source 1..33: mol_type = other DNA

SEQ ID NO: 12845 - DNA, 36 bp, synthetic construct; identical to SEQ ID NO: 8935
  misc_feature 1..36: note = Synthetic construct
  source 1..36: mol_type = other DNA

SEQ ID NO: 12846 - DNA, 36 bp, synthetic construct; identical to SEQ ID NO: 8936
  misc_feature 1..36: note = Synthetic construct
  source 1..36: mol_type = other DNA

SEQ ID NO: 12847 - DNA, 33 bp, synthetic construct; identical to SEQ ID NO: 8937
  misc_feature 1..33: note = Synthetic construct
  source 1..33: mol_type = other DNA

SEQ ID NO: 12848 - DNA, 36 bp, synthetic construct; identical to SEQ ID NO: 8938
  misc_feature 1..36: note = Synthetic construct
  source 1..36: mol_type = other DNA

SEQ ID NO: 12849 - DNA, 33 bp, synthetic construct; identical to SEQ ID NO: 8939
  misc_feature 1..33: note = Synthetic construct
  source 1..33: mol_type = other DNA

SEQ ID NO: 12850 - DNA, 30 bp, synthetic construct; identical to SEQ ID NO: 8940
  misc_feature 1..30: note = Synthetic construct
  source 1..30: mol_type = other DNA

SEQ ID NO: 12851 - DNA, 33 bp, synthetic construct; identical to SEQ ID NO: 8941
  misc_feature 1..33: note = Synthetic construct
  source 1..33: mol_type = other DNA

SEQ ID NO: 12852 - DNA, 33 bp, synthetic construct; identical to SEQ ID NO: 8942
  misc_feature 1..33: note = Synthetic construct
  source 1..33: mol_type = other DNA

SEQ ID NO: 12853 - DNA, 30 bp, synthetic construct; identical to SEQ ID NO: 8943
  misc_feature 1..30: note = Synthetic construct
  source 1..30: mol_type = other DNA

SEQ ID NO: 12854 - DNA, 39 bp, synthetic construct; identical to SEQ ID NO: 8944
  misc_feature 1..39: note = Synthetic construct
  source 1..39: mol_type = other DNA

SEQ ID NO: 12855 - DNA, 36 bp, synthetic construct; identical to SEQ ID NO: 8945
  misc_feature 1..36: note = Synthetic construct
  source 1..36: mol_type = other DNA

SEQ ID NO: 12856 - DNA, 33 bp, synthetic construct; identical to SEQ ID NO: 8946
  misc_feature 1..33: note = Synthetic construct
  source 1..33: mol_type = other DNA

SEQ ID NO: 12857 - DNA, 33 bp, synthetic construct; identical to SEQ ID NO: 8947
  misc_feature 1..33: note = Synthetic construct
  source 1..33: mol_type = other DNA

SEQ ID NO: 12858 - DNA, 33 bp, synthetic construct; identical to SEQ ID NO: 8948
  misc_feature 1..33: note = Synthetic construct
  source 1..33: mol_type = other DNA

SEQ ID NO: 12859 - DNA, 33 bp, synthetic construct; identical to SEQ ID NO: 8949
  misc_feature 1..33: note = Synthetic construct
  source 1..33: mol_type = other DNA

SEQ ID NO: 12860 - DNA, 36 bp, synthetic construct; identical to SEQ ID NO: 8950
  misc_feature 1..36: note = Synthetic construct
  source 1..36: mol_type = other DNA

SEQ ID NO: 12861 - DNA, 30 bp, synthetic construct; identical to SEQ ID NO: 8951
  misc_feature 1..30: note = Synthetic construct
  source 1..30: mol_type = other DNA

SEQ ID NO: 12862 - DNA, 39 bp, synthetic construct; identical to SEQ ID NO: 8952
  misc_feature 1..39: note = Synthetic construct
  source 1..39: mol_type = other DNA

SEQ ID NO: 12863 - DNA, 33 bp, synthetic construct; identical to SEQ ID NO: 8953
  misc_feature 1..33: note = Synthetic construct
  source 1..33: mol_type = other DNA

SEQ ID NO: 12864 - DNA, 36 bp, synthetic construct; identical to SEQ ID NO: 8954
  misc_feature 1..36: note = Synthetic construct
  source 1..36: mol_type = other DNA

SEQ ID NO: 12865 - DNA, 36 bp, synthetic construct; identical to SEQ ID NO: 8955
  misc_feature 1..36: note = Synthetic construct
  source 1..36: mol_type = other DNA

SEQ ID NO: 12866 - DNA, 33 bp, synthetic construct; identical to SEQ ID NO: 8956
  misc_feature 1..33: note = Synthetic construct
  source 1..33: mol_type = other DNA

SEQ ID NO: 12867 - DNA, 33 bp, synthetic construct; identical to SEQ ID NO: 8957
  misc_feature 1..33: note = Synthetic construct
  source 1..33: mol_type = other DNA

SEQ ID NO: 12868 - DNA, 39 bp, synthetic construct; identical to SEQ ID NO: 8958
  misc_feature 1..39: note = Synthetic construct
  source 1..39: mol_type = other DNA

SEQ ID NO: 12869 - DNA, 39 bp, synthetic construct; identical to SEQ ID NO: 8959
  misc_feature 1..39: note = Synthetic construct
  source 1..39: mol_type = other DNA

SEQ ID NO: 12870 - DNA, 39 bp, synthetic construct; identical to SEQ ID NO: 8960
  misc_feature 1..39: note = Synthetic construct
  source 1..39: mol_type = other DNA

SEQ ID NO: 12871 - DNA, 33 bp, synthetic construct; identical to SEQ ID NO: 8961
  misc_feature 1..33: note = Synthetic construct
  source 1..33: mol_type = other DNA

SEQ ID NO: 12872 - DNA, 33 bp, synthetic construct; identical to SEQ ID NO: 8962
  misc_feature 1..33: note = Synthetic construct
  source 1..33: mol_type = other DNA

SEQ ID NO: 12873 - DNA, 39 bp, synthetic construct; identical to SEQ ID NO: 8963
  misc_feature 1..39: note = Synthetic construct
  source 1..39: mol_type = other DNA

SEQ ID NO: 12874 - DNA, 33 bp, synthetic construct; identical to SEQ ID NO: 8964
  misc_feature 1..33: note = Synthetic construct
  source 1..33: mol_type = other DNA

SEQ ID NO: 12875 - DNA, 36 bp, synthetic construct; identical to SEQ ID NO: 8965
  misc_feature 1..36: note = Synthetic construct
  source 1..36: mol_type = other DNA

SEQ ID NO: 12876 - DNA, 33 bp, synthetic construct; identical to SEQ ID NO: 8966
  misc_feature 1..33: note = Synthetic construct
  source 1..33: mol_type = other DNA

SEQ ID NO: 12877 - DNA, 33 bp, synthetic construct; identical to SEQ ID NO: 8967
  misc_feature 1..33: note = Synthetic construct
  source 1..33: mol_type = other DNA

SEQ ID NO: 12878 - DNA, 39 bp, synthetic construct; identical to SEQ ID NO: 8968
  misc_feature 1..39: note = Synthetic construct
  source 1..39: mol_type = other DNA

SEQ ID NO: 12879 - DNA, 36 bp, synthetic construct; identical to SEQ ID NO: 8969
  misc_feature 1..36: note = Synthetic construct
  source 1..36: mol_type = other DNA

SEQ ID NO: 12880 - DNA, 39 bp, synthetic construct; identical to SEQ ID NO: 8970
  misc_feature 1..39: note = Synthetic construct
  source 1..39: mol_type = other DNA

SEQ ID NO: 12881 - DNA, 39 bp, synthetic construct; identical to SEQ ID NO: 8971
  misc_feature 1..39: note = Synthetic construct
  source 1..39: mol_type = other DNA

SEQ ID NO: 12882 - DNA, 30 bp, synthetic construct; identical to SEQ ID NO: 8972
  misc_feature 1..30: note = Synthetic construct
  source 1..30: mol_type = other DNA

SEQ ID NO: 12883 - DNA, 33 bp, synthetic construct; identical to SEQ ID NO: 8973
  misc_feature 1..33: note = Synthetic construct
  source 1..33: mol_type = other DNA

SEQ ID NO: 12884 - DNA, 39 bp, synthetic construct; identical to SEQ ID NO: 8974
  misc_feature 1..39: note = Synthetic construct
  source 1..39: mol_type = other DNA

SEQ ID NO: 12885 - DNA, 30 bp, synthetic construct; identical to SEQ ID NO: 1836
  misc_feature 1..30: note = Synthetic construct
  source 1..30: mol_type = other DNA

SEQ ID NO: 12886 - DNA, 33 bp, synthetic construct; identical to SEQ ID NO: 8976
  misc_feature 1..33: note = Synthetic construct
  source 1..33: mol_type = other DNA

SEQ ID NO: 12887 - DNA, 33 bp, synthetic construct; identical to SEQ ID NO: 8977
  misc_feature 1..33: note = Synthetic construct
  source 1..33: mol_type = other DNA

SEQ ID NO: 12888 - DNA, 33 bp, synthetic construct; identical to SEQ ID NO: 8978
  misc_feature 1..33: note = Synthetic construct
  source 1..33: mol_type = other DNA

SEQ ID NO: 12889 - DNA, 36 bp, synthetic construct; identical to SEQ ID NO: 8979
  misc_feature 1..36: note = Synthetic construct
  source 1..36: mol_type = other DNA

SEQ ID NO: 12890 - DNA, 39 bp, synthetic construct; identical to SEQ ID NO: 8980
  misc_feature 1..39: note = Synthetic construct
  source 1..39: mol_type = other DNA

SEQ ID NO: 12891 - DNA, 30 bp, synthetic construct; identical to SEQ ID NO: 8981
  misc_feature 1..30: note = Synthetic construct
  source 1..30: mol_type = other DNA

SEQ ID NO: 12892 - DNA, 33 bp, synthetic construct; identical to SEQ ID NO: 8982
  misc_feature 1..33: note = Synthetic construct
  source 1..33: mol_type = other DNA

SEQ ID NO: 12893 - DNA, 33 bp, synthetic construct; identical to SEQ ID NO: 8983
  misc_feature 1..33: note = Synthetic construct
  source 1..33: mol_type = other DNA

SEQ ID NO: 12894 - DNA, 39 bp, synthetic construct; identical to SEQ ID NO: 8984
  misc_feature 1..39: note = Synthetic construct
  source 1..39: mol_type = other DNA

SEQ ID NO: 12895 - DNA, 39 bp, synthetic construct; identical to SEQ ID NO: 8985
  misc_feature 1..39: note = Synthetic construct
  source 1..39: mol_type = other DNA

SEQ ID NO: 12896 - DNA, 33 bp, synthetic construct; identical to SEQ ID NO: 8986
  misc_feature 1..33: note = Synthetic construct
  source 1..33: mol_type = other DNA

SEQ ID NO: 12897 - DNA, 39 bp, synthetic construct; identical to SEQ ID NO: 8987
  misc_feature 1..39: note = Synthetic construct
  source 1..39: mol_type = other DNA

SEQ ID NO: 12898 - DNA, 36 bp, synthetic construct; identical to SEQ ID NO: 8988
  misc_feature 1..36: note = Synthetic construct
  source 1..36: mol_type = other DNA

SEQ ID NO: 12899 - DNA, 33 bp, synthetic construct; identical to SEQ ID NO: 8989
  misc_feature 1..33: note = Synthetic construct
  source 1..33: mol_type = other DNA

SEQ ID NO: 12900 - DNA, 33 bp, synthetic construct; identical to SEQ ID NO: 8990
  misc_feature 1..33: note = Synthetic construct
  source 1..33: mol_type = other DNA

SEQ ID NO: 12901 - DNA, 36 bp, synthetic construct; identical to SEQ ID NO: 1839
  misc_feature 1..36: note = Synthetic construct
  source 1..36: mol_type = other DNA

SEQ ID NO: 12902 - DNA, 33 bp, synthetic construct; identical to SEQ ID NO: 8992
  misc_feature 1..33: note = Synthetic construct
  source 1..33: mol_type = other DNA

SEQ ID NO: 12903 - DNA, 33 bp, synthetic construct; identical to SEQ ID NO: 8993
  misc_feature 1..33: note = Synthetic construct
  source 1..33: mol_type = other DNA

SEQ ID NO: 12904 - DNA, 30 bp, synthetic construct; identical to SEQ ID NO: 8994
  misc_feature 1..30: note = Synthetic construct
  source 1..30: mol_type = other DNA

SEQ ID NO: 12905 - DNA, 33 bp, synthetic construct; identical to SEQ ID NO: 8995
  misc_feature 1..33: note = Synthetic construct
  source 1..33: mol_type = other DNA

SEQ ID NO: 12906 - DNA, 39 bp, synthetic construct; identical to SEQ ID NO: 8996
  misc_feature 1..39: note = Synthetic construct
  source 1..39: mol_type = other DNA

SEQ ID NO: 12907 - DNA, 30 bp, synthetic construct; identical to SEQ ID NO: 8997
  misc_feature 1..30: note = Synthetic construct
  source 1..30: mol_type = other DNA

SEQ ID NO: 12908 - DNA, 36 bp, synthetic construct; identical to SEQ ID NO: 8998
  misc_feature 1..36: note = Synthetic construct
  source 1..36: mol_type = other DNA

SEQ ID NO: 12909 - DNA, 33 bp, synthetic construct; identical to SEQ ID NO: 8999
  misc_feature 1..33: note = Synthetic construct
  source 1..33: mol_type = other DNA

SEQ ID NO: 12910 - DNA, 33 bp, synthetic construct; identical to SEQ ID NO: 9000
  misc_feature 1..33: note = Synthetic construct
  source 1..33: mol_type = other DNA

SEQ ID NO: 12911 - DNA, 42 bp, synthetic construct; identical to SEQ ID NO: 9001
  misc_feature 1..42: note = Synthetic construct
  source 1..42: mol_type = other DNA

SEQ ID NO: 12912 - DNA, 39 bp, synthetic construct; identical to SEQ ID NO: 9002
  misc_feature 1..39: note = Synthetic construct
  source 1..39: mol_type = other DNA

SEQ ID NO: 12913 - DNA, 33 bp, synthetic construct; identical to SEQ ID NO: 9003
  misc_feature 1..33: note = Synthetic construct
  source 1..33: mol_type = other DNA

SEQ ID NO: 12914 - DNA, 33 bp, synthetic construct; identical to SEQ ID NO: 9004
  misc_feature 1..33: note = Synthetic construct
  source 1..33: mol_type = other DNA

SEQ ID NO: 12915 - DNA, 33 bp, synthetic construct; identical to SEQ ID NO: 1835
  misc_feature 1..33: note = Synthetic construct
  source 1..33: mol_type = other DNA

SEQ ID NO: 12916 - DNA, 36 bp, synthetic construct; identical to SEQ ID NO: 9006
  misc_feature 1..36: note = Synthetic construct
  source 1..36: mol_type = other DNA

SEQ ID NO: 12917 - DNA, 33 bp, synthetic construct; identical to SEQ ID NO: 9007
  misc_feature 1..33: note = Synthetic construct
  source 1..33: mol_type = other DNA

SEQ ID NO: 12918 - DNA, 33 bp, synthetic construct; identical to SEQ ID NO: 9008
  misc_feature 1..33: note = Synthetic construct
  source 1..33: mol_type = other DNA

SEQ ID NO: 12919 - DNA, 33 bp, synthetic construct; identical to SEQ ID NO: 9009
  misc_feature 1..33: note = Synthetic construct
  source 1..33: mol_type = other DNA

SEQ ID NO: 12920 - DNA, 36 bp, synthetic construct; identical to SEQ ID NO: 9010
  misc_feature 1..36: note = Synthetic construct
  source 1..36: mol_type = other DNA

SEQ ID NO: 12921 - DNA, 39 bp, synthetic construct; identical to SEQ ID NO: 9011
  misc_feature 1..39: note = Synthetic construct
  source 1..39: mol_type = other DNA

SEQ ID NO: 12922 - DNA, 39 bp, synthetic construct; identical to SEQ ID NO: 9012
  misc_feature 1..39: note = Synthetic construct
  source 1..39: mol_type = other DNA

SEQ ID NO: 12923 - DNA, 39 bp, synthetic construct; identical to SEQ ID NO: 9013
  misc_feature 1..39: note = Synthetic construct
  source 1..39: mol_type = other DNA

SEQ ID NO: 12924 - DNA, 33 bp, synthetic construct; identical to SEQ ID NO: 9014
  misc_feature 1..33: note = Synthetic construct
  source 1..33: mol_type = other DNA

SEQ ID NO: 12925 - DNA, 39 bp, synthetic construct; identical to SEQ ID NO: 9015
  misc_feature 1..39: note = Synthetic construct
  source 1..39: mol_type = other DNA

SEQ ID NO: 12926 - DNA, 39 bp, synthetic construct; identical to SEQ ID NO: 9016
  misc_feature 1..39: note = Synthetic construct
  source 1..39: mol_type = other DNA

SEQ ID NO: 12927 - DNA, 39 bp, synthetic construct; identical to SEQ ID NO: 9017
  misc_feature 1..39: note = Synthetic construct
  source 1..39: mol_type = other DNA

SEQ ID NO: 12928 - DNA, 33 bp, synthetic construct; identical to SEQ ID NO: 9018
  misc_feature 1..33: note = Synthetic construct
  source 1..33: mol_type = other DNA

SEQ ID NO: 12929 - DNA, 33 bp, synthetic construct; identical to SEQ ID NO: 9019
  misc_feature 1..33: note = Synthetic construct
  source 1..33: mol_type = other DNA

SEQ ID NO: 12930 - DNA, 36 bp, synthetic construct; identical to SEQ ID NO: 9020
  misc_feature 1..36: note = Synthetic construct
  source 1..36: mol_type = other DNA

SEQ ID NO: 12931 - DNA, 33 bp, synthetic construct; identical to SEQ ID NO: 9021
  misc_feature 1..33: note = Synthetic construct
  source 1..33: mol_type = other DNA

SEQ ID NO: 12932 - DNA, 33 bp, synthetic construct; identical to SEQ ID NO: 9022
  misc_feature 1..33: note = Synthetic construct
  source 1..33: mol_type = other DNA

SEQ ID NO: 12933 - DNA, 30 bp, synthetic construct; identical to SEQ ID NO: 9023
  misc_feature 1..30: note = Synthetic construct
  source 1..30: mol_type = other DNA

SEQ ID NO: 12934 - DNA, 33 bp, synthetic construct; identical to SEQ ID NO: 9024
  misc_feature 1..33: note = Synthetic construct
  source 1..33: mol_type = other DNA

SEQ ID NO: 12935 - DNA, 39 bp, synthetic construct; identical to SEQ ID NO: 9025
  misc_feature 1..39: note = Synthetic construct
  source 1..39: mol_type = other DNA

SEQ ID NO: 12936 - DNA, 39 bp, synthetic construct; identical to SEQ ID NO: 9026
  misc_feature 1..39: note = Synthetic construct
  source 1..39: mol_type = other DNA

SEQ ID NO: 12937 - DNA, 33 bp, synthetic construct; identical to SEQ ID NO: 9027
  misc_feature 1..33: note = Synthetic construct
  source 1..33: mol_type = other DNA

SEQ ID NO: 12938 - DNA, 39 bp, synthetic construct; identical to SEQ ID NO: 9028
  misc_feature 1..39: note = Synthetic construct
  source 1..39: mol_type = other DNA

SEQ ID NO: 12939 - DNA, 33 bp, synthetic construct; identical to SEQ ID NO: 9029
  misc_feature 1..33: note = Synthetic construct
  source 1..33: mol_type = other DNA

SEQ ID NO: 12940 - DNA, 39 bp, synthetic construct; identical to SEQ ID NO: 9030
  misc_feature 1..39: note = Synthetic construct
  source 1..39: mol_type = other DNA

SEQ ID NO: 12941 - DNA, 39 bp, synthetic construct; identical to SEQ ID NO: 9031
  misc_feature 1..39: note = Synthetic construct
  source 1..39: mol_type = other DNA

SEQ ID NO: 12942 - DNA, 33 bp, synthetic construct; identical to SEQ ID NO: 9032
  misc_feature 1..33: note = Synthetic construct
  source 1..33: mol_type = other DNA

SEQ ID NO: 12943 - DNA, 36 bp, synthetic construct; identical to SEQ ID NO: 9033
  misc_feature 1..36: note = Synthetic construct
  source 1..36: mol_type = other DNA

SEQ ID NO: 12944 - DNA, 36 bp, synthetic construct; identical to SEQ ID NO: 9034
  misc_feature 1..36: note = Synthetic construct
  source 1..36: mol_type = other DNA

SEQ ID NO: 12945 - DNA, 33 bp, synthetic construct; identical to SEQ ID NO: 9035
  misc_feature 1..33: note = Synthetic construct
  source 1..33: mol_type = other DNA

SEQ ID NO: 12946 - DNA, 39 bp, synthetic construct; identical to SEQ ID NO: 9036
  misc_feature 1..39: note = Synthetic construct
  source 1..39: mol_type = other DNA

SEQ ID NO: 12947 - DNA, 33 bp, synthetic construct; identical to SEQ ID NO: 9037
  misc_feature 1..33: note = Synthetic construct
  source 1..33: mol_type = other DNA

SEQ ID NO: 12948 - DNA, 33 bp, synthetic construct; identical to SEQ ID NO: 9038
  misc_feature 1..33: note = Synthetic construct
  source 1..33: mol_type = other DNA

SEQ ID NO: 12949 - DNA, 39 bp, synthetic construct; identical to SEQ ID NO: 9039
  misc_feature 1..39: note = Synthetic construct
  source 1..39: mol_type = other DNA

SEQ ID NO: 12950 - DNA, 33 bp, synthetic construct; identical to SEQ ID NO: 9040
  misc_feature 1..33: note = Synthetic construct
  source 1..33: mol_type = other DNA

SEQ ID NO: 12951 - DNA, 33 bp, synthetic construct; identical to SEQ ID NO: 9041
  misc_feature 1..33: note = Synthetic construct
  source 1..33: mol_type = other DNA

SEQ ID NO: 12952 - DNA, 33 bp, synthetic construct; identical to SEQ ID NO: 9042
  misc_feature 1..33: note = Synthetic construct
  source 1..33: mol_type = other DNA

SEQ ID NO: 12953 - DNA, 33 bp, synthetic construct; identical to SEQ ID NO: 9043
  misc_feature 1..33: note = Synthetic construct
  source 1..33: mol_type = other DNA

SEQ ID NO: 12954 - DNA, 42 bp, synthetic construct; identical to SEQ ID NO: 9044
  misc_feature 1..42: note = Synthetic construct
  source 1..42: mol_type = other DNA

SEQ ID NO: 12955 - DNA, 33 bp, synthetic construct; identical to SEQ ID NO: 9045
  misc_feature 1..33: note = Synthetic construct
  source 1..33: mol_type = other DNA

SEQ ID NO: 12956 - DNA, 36 bp, synthetic construct; identical to SEQ ID NO: 9046
  misc_feature 1..36: note = Synthetic construct
  source 1..36: mol_type = other DNA

SEQ ID NO: 12957 - DNA, 33 bp, synthetic construct; identical to SEQ ID NO: 9047
  misc_feature 1..33: note = Synthetic construct
  source 1..33: mol_type = other DNA

SEQ ID NO: 12958 - DNA, 33 bp, synthetic construct; identical to SEQ ID NO: 9048
  misc_feature 1..33: note = Synthetic construct
  source 1..33: mol_type = other DNA

SEQ ID NO: 12959 - DNA, 33 bp, synthetic construct; identical to SEQ ID NO: 9049
  misc_feature 1..33: note = Synthetic construct
  source 1..33: mol_type = other DNA

SEQ ID NO: 12960 - DNA, 39 bp, synthetic construct; identical to SEQ ID NO: 9050
  misc_feature 1..39: note = Synthetic construct
  source 1..39: mol_type = other DNA

SEQ ID NO: 12961 - DNA, 39 bp, synthetic construct; identical to SEQ ID NO: 9051
  misc_feature 1..39: note = Synthetic construct
  source 1..39: mol_type = other DNA

SEQ ID NO: 12962 - DNA, 36 bp, synthetic construct; identical to SEQ ID NO: 9052
  misc_feature 1..36: note = Synthetic construct
  source 1..36: mol_type = other DNA

SEQ ID NO: 12963 - DNA, 33 bp, synthetic construct; identical to SEQ ID NO: 9053
  misc_feature 1..33: note = Synthetic construct
  source 1..33: mol_type = other DNA

SEQ ID NO: 12964 - DNA, 33 bp, synthetic construct; identical to SEQ ID NO: 9054
  misc_feature 1..33: note = Synthetic construct
  source 1..33: mol_type = other DNA

SEQ ID NO: 12965 - DNA, 33 bp, synthetic construct; identical to SEQ ID NO: 9055
  misc_feature 1..33: note = Synthetic construct
  source 1..33: mol_type = other DNA

SEQ ID NO: 12966 - DNA, 33 bp, synthetic construct; identical to SEQ ID NO: 9056
  misc_feature 1..33: note = Synthetic construct
  source 1..33: mol_type = other DNA

SEQ ID NO: 12967 - DNA, 21 bp, synthetic construct
  misc_feature 1..21: note = Synthetic construct
  source 1..21: mol_type = other DNA
tgtcaacagagtggcactttc

SEQ ID NO: 12968 - DNA, 30 bp, synthetic construct; identical to SEQ ID NO: 9058
  misc_feature 1..30: note = Synthetic construct
  source 1..30: mol_type = other DNA

SEQ ID NO: 12969 - DNA, 39 bp, synthetic construct; identical to SEQ ID NO: 9059
  misc_feature 1..39: note = Synthetic construct
  source 1..39: mol_type = other DNA

SEQ ID NO: 12970 - DNA, 39 bp, synthetic construct; identical to SEQ ID NO: 9060
  misc_feature 1..39: note = Synthetic construct
  source 1..39: mol_type = other DNA

SEQ ID NO: 12971 - DNA, 33 bp, synthetic construct; identical to SEQ ID NO: 9061
  misc_feature 1..33: note = Synthetic construct
  source 1..33: mol_type = other DNA

SEQ ID NO: 12972 - DNA, 30 bp, synthetic construct; identical to SEQ ID NO: 9062
  misc_feature 1..30: note = Synthetic construct
  source 1..30: mol_type = other DNA

SEQ ID NO: 12973 - DNA, 33 bp, synthetic construct; identical to SEQ ID NO: 9063
  misc_feature 1..33: note = Synthetic construct
  source 1..33: mol_type = other DNA

SEQ ID NO: 12974 - DNA, 33 bp, synthetic construct; identical to SEQ ID NO: 9064
  misc_feature 1..33: note = Synthetic construct
  source 1..33: mol_type = other DNA

SEQ ID NO: 12975 - DNA, 39 bp, synthetic construct; identical to SEQ ID NO: 9065
  misc_feature 1..39: note = Synthetic construct
  source 1..39: mol_type = other DNA

SEQ ID NO: 12976 - DNA, 39 bp, synthetic construct; identical to SEQ ID NO: 9066
  misc_feature 1..39: note = Synthetic construct
  source 1..39: mol_type = other DNA

SEQ ID NO: 12977 - DNA, 39 bp, synthetic construct; identical to SEQ ID NO: 9067
  misc_feature 1..39: note = Synthetic construct
  source 1..39: mol_type = other DNA

SEQ ID NO: 12978 - DNA, 33 bp, synthetic construct; identical to SEQ ID NO: 9068
  misc_feature 1..33: note = Synthetic construct
  source 1..33: mol_type = other DNA

SEQ ID NO: 12979 - DNA, 39 bp, synthetic construct; identical to SEQ ID NO: 9069
  misc_feature 1..39: note = Synthetic construct
  source 1..39: mol_type = other DNA

SEQ ID NO: 12980 - DNA, 39 bp, synthetic construct; identical to SEQ ID NO: 9070
  misc_feature 1..39: note = Synthetic construct
  source 1..39: mol_type = other DNA

SEQ ID NO: 12981 - DNA, 39 bp, synthetic construct; identical to SEQ ID NO: 9071
  misc_feature 1..39: note = Synthetic construct
  source 1..39: mol_type = other DNA

SEQ ID NO: 12982 - DNA, 33 bp, synthetic construct; identical to SEQ ID NO: 9072
  misc_feature 1..33: note = Synthetic construct
  source 1..33: mol_type = other DNA

SEQ ID NO: 12983 - DNA, 33 bp, synthetic construct; identical to SEQ ID NO: 9073
  misc_feature 1..33: note = Synthetic construct
  source 1..33: mol_type = other DNA

SEQ ID NO: 12984 - DNA, 39 bp, synthetic construct; identical to SEQ ID NO: 9074
  misc_feature 1..39: note = Synthetic construct
  source 1..39: mol_type = other DNA

SEQ ID NO: 12985 - DNA, 39 bp, synthetic construct; identical to SEQ ID NO: 9075
  misc_feature 1..39: note = Synthetic construct
  source 1..39: mol_type = other DNA

SEQ ID NO: 12986 - DNA, 33 bp, synthetic construct; identical to SEQ ID NO: 9076
  misc_feature 1..33: note = Synthetic construct
  source 1..33: mol_type = other DNA

SEQ ID NO: 12987 - DNA, 33 bp, synthetic construct; identical to SEQ ID NO: 9077
  misc_feature 1..33: note = Synthetic construct
  source 1..33: mol_type = other DNA

SEQ ID NO: 12988 - DNA, 33 bp, synthetic construct; identical to SEQ ID NO: 9078
  misc_feature 1..33: note = Synthetic construct
  source 1..33: mol_type = other DNA

SEQ ID NO: 12989 - DNA, 33 bp, synthetic construct; identical to SEQ ID NO: 9079
  misc_feature 1..33: note = Synthetic construct
  source 1..33: mol_type = other DNA

SEQ ID NO: 12990 - DNA, 36 bp, synthetic construct; identical to SEQ ID NO: 9080
  misc_feature 1..36: note = Synthetic construct
  source 1..36: mol_type = other DNA

SEQ ID NO: 12991 - DNA, 33 bp, synthetic construct; identical to SEQ ID NO: 9081
  misc_feature 1..33: note = Synthetic construct
  source 1..33: mol_type = other DNA

SEQ ID NO: 12992 - DNA, 33 bp, synthetic construct; identical to SEQ ID NO: 9082
  misc_feature 1..33: note = Synthetic construct
  source 1..33: mol_type = other DNA

SEQ ID NO: 12993 - DNA, 39 bp, synthetic construct; identical to SEQ ID NO: 9083
  misc_feature 1..39: note = Synthetic construct
  source 1..39: mol_type = other DNA

SEQ ID NO: 12994 - DNA, 33 bp, synthetic construct; identical to SEQ ID NO: 8565
  misc_feature 1..33: note = Synthetic construct
  source 1..33: mol_type = other DNA

SEQ ID NO: 12995 - DNA, 39 bp, synthetic construct; identical to SEQ ID NO: 9084
  misc_feature 1..39: note = Synthetic construct
  source 1..39: mol_type = other DNA

SEQ ID NO: 12996 - DNA, 39 bp, synthetic construct; identical to SEQ ID NO: 9085
  misc_feature 1..39: note = Synthetic construct
  source 1..39: mol_type = other DNA

SEQ ID NO: 12997 - DNA, 36 bp, synthetic construct; identical to SEQ ID NO: 9086
  misc_feature 1..36: note = Synthetic construct
  source 1..36: mol_type = other DNA

SEQ ID NO: 12998 - DNA, 33 bp, synthetic construct; identical to SEQ ID NO: 9087
  misc_feature 1..33: note = Synthetic construct
  source 1..33: mol_type = other DNA

SEQ ID NO: 12999 - DNA, 30 bp, synthetic construct; identical to SEQ ID NO: 9088
  misc_feature 1..30: note = Synthetic construct
  source 1..30: mol_type = other DNA

SEQ ID NO: 13000 - DNA, 30 bp, synthetic construct; identical to SEQ ID NO: 9089
  misc_feature 1..30: note = Synthetic construct
  source 1..30: mol_type = other DNA

SEQ ID NO: 13001 - DNA, 33 bp, synthetic construct; identical to SEQ ID NO: 9090
  misc_feature 1..33: note = Synthetic construct
  source 1..33: mol_type = other DNA

SEQ ID NO: 13002 - DNA, 36 bp, synthetic construct; identical to SEQ ID NO: 9091
  misc_feature 1..36: note = Synthetic construct
  source 1..36: mol_type = other DNA

SEQ ID NO: 13003 - DNA, 33 bp, synthetic construct; identical to SEQ ID NO: 9092
  misc_feature 1..33: note = Synthetic construct
  source 1..33: mol_type = other DNA

SEQ ID NO: 13004 - DNA, 33 bp, synthetic construct; identical to SEQ ID NO: 9093
  misc_feature 1..33: note = Synthetic construct
  source 1..33: mol_type = other DNA

SEQ ID NO: 13005 - DNA, 33 bp, synthetic construct; identical to SEQ ID NO: 9094
  misc_feature 1..33: note = Synthetic construct
  source 1..33: mol_type = other DNA

SEQ ID NO: 13006 - DNA, 33 bp, synthetic construct; identical to SEQ ID NO: 9095
  misc_feature 1..33: note = Synthetic construct
  source 1..33: mol_type = other DNA

SEQ ID NO: 13007 - DNA, 33 bp, synthetic construct; identical to SEQ ID NO: 9096
  misc_feature 1..33: note = Synthetic construct
  source 1..33: mol_type = other DNA

SEQ ID NO: 13008 - DNA, 33 bp, synthetic construct; identical to SEQ ID NO: 9097
  misc_feature 1..33: note = Synthetic construct
  source 1..33: mol_type = other DNA

SEQ ID NO: 13009 - DNA, 39 bp, synthetic construct; identical to SEQ ID NO: 9098
  misc_feature 1..39: note = Synthetic construct
  source 1..39: mol_type = other DNA

SEQ ID NO: 13010 - DNA, 33 bp, synthetic construct; identical to SEQ ID NO: 9099
  misc_feature 1..33: note = Synthetic construct
  source 1..33: mol_type = other DNA

SEQ ID NO: 13011 - DNA, 33 bp, synthetic construct; identical to SEQ ID NO: 9100
  misc_feature 1..33: note = Synthetic construct
  source 1..33: mol_type = other DNA

SEQ ID NO: 13012 - DNA, 33 bp, synthetic construct; identical to SEQ ID NO: 9101
  misc_feature 1..33: note = Synthetic construct
  source 1..33: mol_type = other DNA

SEQ ID NO: 13013 - DNA, 33 bp, synthetic construct; identical to SEQ ID NO: 9102
  misc_feature 1..33: note = Synthetic construct
  source 1..33: mol_type = other DNA

SEQ ID NO: 13014 - DNA, 33 bp, synthetic construct; identical to SEQ ID NO: 9103
  misc_feature 1..33: note = Synthetic construct
  source 1..33: mol_type = other DNA

SEQ ID NO: 13015 - DNA, 33 bp, synthetic construct; identical to SEQ ID NO: 9104
  misc_feature 1..33: note = Synthetic construct
  source 1..33: mol_type = other DNA

SEQ ID NO: 13016 - DNA, 33 bp, synthetic construct; identical to SEQ ID NO: 9105
  misc_feature 1..33: note = Synthetic construct
  source 1..33: mol_type = other DNA

SEQ ID NO: 13017 - DNA, 33 bp, synthetic construct; identical to SEQ ID NO: 9106
  misc_feature 1..33: note = Synthetic construct
  source 1..33: mol_type = other DNA

SEQ ID NO: 13018 - DNA, 33 bp, synthetic construct; identical to SEQ ID NO: 9107
  misc_feature 1..33: note = Synthetic construct
  source 1..33: mol_type = other DNA

SEQ ID NO: 13019 - DNA, 36 bp, synthetic construct; identical to SEQ ID NO: 9108
  misc_feature 1..36: note = Synthetic construct
  source 1..36: mol_type = other DNA

SEQ ID NO: 13020 - DNA, 39 bp, synthetic construct; identical to SEQ ID NO: 9109
  misc_feature 1..39: note = Synthetic construct
  source 1..39: mol_type = other DNA

SEQ ID NO: 13021 - DNA, 33 bp, synthetic construct; identical to SEQ ID NO: 9110
  misc_feature 1..33: note = Synthetic construct
  source 1..33: mol_type = other DNA

SEQ ID NO: 13022 - DNA, 33 bp, synthetic construct; identical to SEQ ID NO: 9111
  misc_feature 1..33: note = Synthetic construct
  source 1..33: mol_type = other DNA

SEQ ID NO: 13023 - DNA, 33 bp, synthetic construct; identical to SEQ ID NO: 9112
  misc_feature 1..33: note = Synthetic construct
  source 1..33: mol_type = other DNA

SEQ ID NO: 13024 - DNA, 33 bp, synthetic construct; identical to SEQ ID NO: 9113
  misc_feature 1..33: note = Synthetic construct
  source 1..33: mol_type = other DNA

SEQ ID NO: 13025 - DNA, 33 bp, synthetic construct; identical to SEQ ID NO: 9114
  misc_feature 1..33: note = Synthetic construct
  source 1..33: mol_type = other DNA

SEQ ID NO: 13026 - DNA, 36 bp, synthetic construct; identical to SEQ ID NO: 9115
  misc_feature 1..36: note = Synthetic construct
  source 1..36: mol_type = other DNA

SEQ ID NO: 13027 - DNA, 33 bp, synthetic construct; identical to SEQ ID NO: 9116
  misc_feature 1..33: note = Synthetic construct
  source 1..33: mol_type = other DNA

SEQ ID NO: 13028 - DNA, 33 bp, synthetic construct; identical to SEQ ID NO: 9117
  misc_feature 1..33: note = Synthetic construct
  source 1..33: mol_type = other DNA

SEQ ID NO: 13029 - DNA, 33 bp, synthetic construct; identical to SEQ ID NO: 9118
  misc_feature 1..33: note = Synthetic construct
  source 1..33: mol_type = other DNA

SEQ ID NO: 13030 - DNA, 36 bp, synthetic construct; identical to SEQ ID NO: 9119
  misc_feature 1..36: note = Synthetic construct
  source 1..36: mol_type = other DNA

SEQ ID NO: 13031 - DNA, 39 bp, synthetic construct; identical to SEQ ID NO: 9120
  misc_feature 1..39: note = Synthetic construct
  source 1..39: mol_type = other DNA

SEQ ID NO: 13032 - DNA, 33 bp, synthetic construct; identical to SEQ ID NO: 9121
  misc_feature 1..33: note = Synthetic construct
  source 1..33: mol_type = other DNA

SEQ ID NO: 13033 - DNA, 33 bp, synthetic construct; identical to SEQ ID NO: 9122
  misc_feature 1..33: note = Synthetic construct
  source 1..33: mol_type = other DNA

SEQ ID NO: 13034 - DNA, 36 bp, synthetic construct; identical to SEQ ID NO: 9123
  misc_feature 1..36: note = Synthetic construct
  source 1..36: mol_type = other DNA

SEQ ID NO: 13035 - DNA, 33 bp, synthetic construct; identical to SEQ ID NO: 9124
  misc_feature 1..33: note = Synthetic construct
  source 1..33: mol_type = other DNA

SEQ ID NO: 13036 - DNA, 36 bp, synthetic construct; identical to SEQ ID NO: 9125
  misc_feature 1..36: note = Synthetic construct
  source 1..36: mol_type = other DNA

SEQ ID NO: 13037 - DNA, 36 bp, synthetic construct; identical to SEQ ID NO: 9126
  misc_feature 1..36: note = Synthetic construct
  source 1..36: mol_type = other DNA

SEQ ID NO: 13038 - DNA, 39 bp, synthetic construct; identical to SEQ ID NO: 9127
  misc_feature 1..39: note = Synthetic construct
  source 1..39: mol_type = other DNA

SEQ ID NO: 13039 - DNA, 45 bp, synthetic construct; identical to SEQ ID NO: 9128
  misc_feature 1..45: note = Synthetic construct
  source 1..45: mol_type = other DNA

SEQ ID NO: 13040 - DNA, 33 bp, synthetic construct; identical to SEQ ID NO: 9129
  misc_feature 1..33: note = Synthetic construct
  source 1..33: mol_type = other DNA

SEQ ID NO: 13041 - DNA, 33 bp, synthetic construct; identical to SEQ ID NO: 9130
  misc_feature 1..33: note = Synthetic construct
  source 1..33: mol_type = other DNA

SEQ ID NO: 13042 - DNA, 39 bp, synthetic construct; identical to SEQ ID NO: 9131
  misc_feature 1..39: note = Synthetic construct
  source 1..39: mol_type = other DNA

SEQ ID NO: 13043 - DNA, 39 bp, synthetic construct; identical to SEQ ID NO: 9132
  misc_feature 1..39: note = Synthetic construct
  source 1..39: mol_type = other DNA

SEQ ID NO: 13044 - DNA, 33 bp, synthetic construct; identical to SEQ ID NO: 9133
  misc_feature 1..33: note = Synthetic construct
  source 1..33: mol_type = other DNA

SEQ ID NO: 13045 - DNA, 30 bp, synthetic construct; identical to SEQ ID NO: 9134
  misc_feature 1..30: note = Synthetic construct
  source 1..30: mol_type = other DNA

SEQ ID NO: 13046 - DNA, 33 bp, synthetic construct; identical to SEQ ID NO: 9135
  misc_feature 1..33: note = Synthetic construct
  source 1..33: mol_type = other DNA

SEQ ID NO: 13047 - DNA, 33 bp, synthetic construct; identical to SEQ ID NO: 9136
  misc_feature 1..33: note = Synthetic construct
  source 1..33: mol_type = other DNA

SEQ ID NO: 13048 - DNA, 39 bp, synthetic construct; identical to SEQ ID NO: 9137
  misc_feature 1..39: note = Synthetic construct
  source 1..39: mol_type = other DNA

SEQ ID NO: 13049 - DNA, 33 bp, synthetic construct; identical to SEQ ID NO: 9138
  misc_feature 1..33: note = Synthetic construct
  source 1..33: mol_type = other DNA

SEQ ID NO: 13050 - DNA, 33 bp, synthetic construct; identical to SEQ ID NO: 9139
  misc_feature 1..33: note = Synthetic construct
  source 1..33: mol_type = other DNA

SEQ ID NO: 13051 - DNA, 33 bp, synthetic construct; identical to SEQ ID NO: 9140
  misc_feature 1..33: note = Synthetic construct
  source 1..33: mol_type = other DNA

SEQ ID NO: 13052 - DNA, 30 bp, synthetic construct; identical to SEQ ID NO: 9141
  misc_feature 1..30: note = Synthetic construct
  source 1..30: mol_type = other DNA

SEQ ID NO: 13053 - DNA, 39 bp, synthetic construct; identical to SEQ ID NO: 9142
  misc_feature 1..39: note = Synthetic construct
  source 1..39: mol_type = other DNA

SEQ ID NO: 13054 - DNA, 33 bp, synthetic construct; identical to SEQ ID NO: 9143
  misc_feature 1..33: note = Synthetic construct
  source 1..33: mol_type = other DNA

SEQ ID NO: 13055 - DNA, 33 bp, synthetic construct; identical to SEQ ID NO: 9144
  misc_feature 1..33: note = Synthetic construct
  source 1..33: mol_type = other DNA

SEQ ID NO: 13056 - DNA, 33 bp, synthetic construct; identical to SEQ ID NO: 9145
  misc_feature 1..33: note = Synthetic construct
  source 1..33: mol_type = other DNA

SEQ ID NO: 13057 - DNA, 39 bp, synthetic construct; identical to SEQ ID NO: 9146
  misc_feature 1..39: note = Synthetic construct
  source 1..39: mol_type = other DNA

SEQ ID NO: 13058 - DNA, 33 bp, synthetic construct; identical to SEQ ID NO: 9147
  misc_feature 1..33: note = Synthetic construct
  source 1..33: mol_type = other DNA

SEQ ID NO: 13059 - DNA, 36 bp, synthetic construct; identical to SEQ ID NO: 9148
  misc_feature 1..36: note = Synthetic construct
  source 1..36: mol_type = other DNA

SEQ ID NO: 13060 - DNA, 33 bp, synthetic construct; identical to SEQ ID NO: 9149
  misc_feature 1..33: note = Synthetic construct
  source 1..33: mol_type = other DNA

SEQ ID NO: 13061 - DNA, 42 bp, synthetic construct; identical to SEQ ID NO: 9150
  misc_feature 1..42: note = Synthetic construct
  source 1..42: mol_type = other DNA

SEQ ID NO: 13062 - DNA, 36 bp, synthetic construct; identical to SEQ ID NO: 9151
  misc_feature 1..36: note = Synthetic construct
  source 1..36: mol_type = other DNA

SEQ ID NO: 13063 - DNA, 33 bp, synthetic construct; identical to SEQ ID NO: 9152
  misc_feature 1..33: note = Synthetic construct
  source 1..33: mol_type = other DNA

SEQ ID NO: 13064 - DNA, 33 bp, synthetic construct; identical to SEQ ID NO: 9153
  misc_feature 1..33: note = Synthetic construct
  source 1..33: mol_type = other DNA

SEQ ID NO: 13065 - DNA, 33 bp, synthetic construct; identical to SEQ ID NO: 9154
  misc_feature 1..33: note = Synthetic construct
  source 1..33: mol_type = other DNA

SEQ ID NO: 13066 - DNA, 39 bp, synthetic construct; identical to SEQ ID NO: 9155
  misc_feature 1..39: note = Synthetic construct
  source 1..39: mol_type = other DNA

SEQ ID NO: 13067 - DNA, 39 bp, synthetic construct; identical to SEQ ID NO: 9156
  misc_feature 1..39: note = Synthetic construct
  source 1..39: mol_type = other DNA

SEQ ID NO: 13068 - DNA, 33 bp, synthetic construct; identical to SEQ ID NO: 9157
  misc_feature 1..33: note = Synthetic construct
  source 1..33: mol_type = other DNA

SEQ ID NO: 13069 - DNA, 39 bp, synthetic construct; identical to SEQ ID NO: 8646
  misc_feature 1..39: note = Synthetic construct
  source 1..39: mol_type = other DNA

SEQ ID NO: 13070 - DNA, 39 bp, synthetic construct; identical to SEQ ID NO: 9158
  misc_feature 1..39: note = Synthetic construct
  source 1..39: mol_type = other DNA

SEQ ID NO: 13071 - DNA, 39 bp, synthetic construct; identical to SEQ ID NO: 9159
  misc_feature 1..39: note = Synthetic construct
  source 1..39: mol_type = other DNA

SEQ ID NO: 13072 - DNA, 39 bp, synthetic construct; identical to SEQ ID NO: 9160
  misc_feature 1..39: note = Synthetic construct
  source 1..39: mol_type = other DNA

SEQ ID NO: 13073 - DNA, 33 bp, synthetic construct; identical to SEQ ID NO: 9161
  misc_feature 1..33: note = Synthetic construct
  source 1..33: mol_type = other DNA

SEQ ID NO: 13074 - DNA, 33 bp, synthetic construct; identical to SEQ ID NO: 9162
  misc_feature 1..33: note = Synthetic construct
  source 1..33: mol_type = other DNA

SEQ ID NO: 13075 - DNA, 33 bp, synthetic construct; identical to SEQ ID NO: 9163
  misc_feature 1..33: note = Synthetic construct
  source 1..33: mol_type = other DNA

SEQ ID NO: 13076 - DNA, 39 bp, synthetic construct; identical to SEQ ID NO: 9164
  misc_feature 1..39: note = Synthetic construct
  source 1..39: mol_type = other DNA

SEQ ID NO: 13077 - DNA, 39 bp, synthetic construct; identical to SEQ ID NO: 9165
  misc_feature 1..39: note = Synthetic construct
  source 1..39: mol_type = other DNA

SEQ ID NO: 13078 - DNA, 36 bp, synthetic construct; identical to SEQ ID NO: 9166
  misc_feature 1..36: note = Synthetic construct
  source 1..36: mol_type = other DNA

SEQ ID NO: 13079 - DNA, 39 bp, synthetic construct; identical to SEQ ID NO: 9167
  misc_feature 1..39: note = Synthetic construct
  source 1..39: mol_type = other DNA

SEQ ID NO: 13080 - DNA, 33 bp, synthetic construct; identical to SEQ ID NO: 9168
  misc_feature 1..33: note = Synthetic construct
  source 1..33: mol_type = other DNA

SEQ ID NO: 13081 - DNA, 36 bp, synthetic construct; identical to SEQ ID NO: 9169
  misc_feature 1..36: note = Synthetic construct
  source 1..36: mol_type = other DNA

SEQ ID NO: 13082 - DNA, 30 bp, synthetic construct; identical to SEQ ID NO: 9170
  misc_feature 1..30: note = Synthetic construct
  source 1..30: mol_type = other DNA

SEQ ID NO: 13083 - DNA, 36 bp, synthetic construct; identical to SEQ ID NO: 9171
  misc_feature 1..36: note = Synthetic construct
  source 1..36: mol_type = other DNA

SEQ ID NO: 13084 - DNA, 30 bp, synthetic construct; identical to SEQ ID NO: 9172
  misc_feature 1..30: note = Synthetic construct
  source 1..30: mol_type = other DNA

SEQ ID NO: 13085 - DNA, 30 bp, synthetic construct; identical to SEQ ID NO: 9173
  misc_feature 1..30: note = Synthetic construct
  source 1..30: mol_type = other DNA

SEQ ID NO: 13086 - DNA, 33 bp, synthetic construct; identical to SEQ ID NO: 9174
  misc_feature 1..33: note = Synthetic construct
  source 1..33: mol_type = other DNA

SEQ ID NO: 13087 - DNA, 33 bp, synthetic construct; identical to SEQ ID NO: 9175
  misc_feature 1..33: note = Synthetic construct
  source 1..33: mol_type = other DNA

SEQ ID NO: 13088 - DNA, 36 bp, synthetic construct; identical to SEQ ID NO: 9176
  misc_feature 1..36: note = Synthetic construct
  source 1..36: mol_type = other DNA

SEQ ID NO: 13089 - DNA, 39 bp, synthetic construct; identical to SEQ ID NO: 9177
  misc_feature 1..39: note = Synthetic construct
  source 1..39: mol_type = other DNA

SEQ ID NO: 13090 - DNA, 33 bp, synthetic construct; identical to SEQ ID NO: 9178
  misc_feature 1..33: note = Synthetic construct
  source 1..33: mol_type = other DNA

SEQ ID NO: 13091 - DNA, 39 bp, synthetic construct; identical to SEQ ID NO: 9179
  misc_feature 1..39: note = Synthetic construct
  source 1..39: mol_type = other DNA

SEQ ID NO: 13092 - DNA, 39 bp, synthetic construct; identical to SEQ ID NO: 1840
  misc_feature 1..39: note = Synthetic construct
  source 1..39: mol_type = other DNA

SEQ ID NO: 13093 - DNA, 39 bp, synthetic construct; identical to SEQ ID NO: 9181
  misc_feature 1..39: note = Synthetic construct
  source 1..39: mol_type = other DNA

SEQ ID NO: 13094 - DNA, 36 bp, synthetic construct; identical to SEQ ID NO: 9182
  misc_feature 1..36: note = Synthetic construct
  source 1..36: mol_type = other DNA

SEQ ID NO: 13095 - DNA, 33 bp, synthetic construct; identical to SEQ ID NO: 9183
  misc_feature 1..33: note = Synthetic construct
  source 1..33: mol_type = other DNA

SEQ ID NO: 13096 - DNA, 33 bp, synthetic construct; identical to SEQ ID NO: 9184
  misc_feature 1..33: note = Synthetic construct
  source 1..33: mol_type = other DNA

SEQ ID NO: 13097 - DNA, 30 bp, synthetic construct; identical to SEQ ID NO: 9185
  misc_feature 1..30: note = Synthetic construct
  source 1..30: mol_type = other DNA

SEQ ID NO: 13098 - DNA, 42 bp, synthetic construct; identical to SEQ ID NO: 9186
  misc_feature 1..42: note = Synthetic construct
  source 1..42: mol_type = other DNA

SEQ ID NO: 13099 - DNA, 39 bp, synthetic construct; identical to SEQ ID NO: 9187
  misc_feature 1..39: note = Synthetic construct
  source 1..39: mol_type = other DNA

SEQ ID NO: 13100 - DNA, 36 bp, synthetic construct; identical to SEQ ID NO: 9188
  misc_feature 1..36: note = Synthetic construct
  source 1..36: mol_type = other DNA

SEQ ID NO: 13101 - DNA, 30 bp, synthetic construct; identical to SEQ ID NO: 9189
  misc_feature 1..30: note = Synthetic construct
  source 1..30: mol_type = other DNA

SEQ ID NO: 13102 - protein, 8 aa, synthetic construct
  REGION 1..8: note = Synthetic construct
GFTFDTAW

SEQ ID NO: 13103 - protein, 8 aa, synthetic construct
  REGION 1..8: note = Synthetic construct
GFSISFYA

SEQ ID NO: 13104 - protein, 8 aa, synthetic construct
  REGION 1..8: note = Synthetic construct
GFTFSGYS

SEQ ID NO: 13105 - protein, 8 aa, synthetic construct
  REGION 1..8: note = Synthetic construct
GYPFSDYD

SEQ ID NO: 13106 - protein, 8 aa, synthetic construct
  REGION 1..8: note = Synthetic construct
GYSFTPFY

SEQ ID NO: 13107 - protein, 8 aa, synthetic construct
  REGION 1..8: note = Synthetic construct
GLTFSTSE

SEQ ID NO: 13108 - protein, 10 aa, synthetic construct
  REGION 1..10: note = Synthetic construct
IQSKNDGGTI

SEQ ID NO: 13109 - protein, 8 aa, synthetic construct
  REGION 1..8: note = Synthetic construct
FSGSGDRL

SEQ ID NO: 13110 - protein, 8 aa, synthetic construct
  REGION 1..8: note = Synthetic construct
ISTGSTKI

SEQ ID NO: 13111 - protein, 8 aa, synthetic construct
  REGION 1..8: note = Synthetic construct
MNPASGNT

SEQ ID NO: 13112 - protein, 8 aa, synthetic construct
  REGION 1..8: note = Synthetic construct
INPSGGGT

SEQ ID NO: 13113 - protein, 7 aa, synthetic construct
  REGION 1..7: note = Synthetic construct
IGRGSSI

SEQ ID NO: 13114 - DNA, 379 bp, synthetic construct; identical to SEQ ID NO: 1763
  misc_feature 1..379: note = Synthetic construct
  source 1..379: mol_type = other DNA

SEQ ID NO: 13115 - DNA, 358 bp, synthetic construct; identical to SEQ ID NO: 1764
  misc_feature 1..358: note = Synthetic construct
  source 1..358: mol_type = other DNA

SEQ ID NO: 13116 - DNA, 364 bp, synthetic construct; identical to SEQ ID NO: 1765
  misc_feature 1..364: note = Synthetic construct
  source 1..364: mol_type = other DNA

SEQ ID NO: 13117 - DNA, 370 bp, synthetic construct; identical to SEQ ID NO: 1766
  misc_feature 1..370: note = Synthetic construct
  source 1..370: mol_type = other DNA

SEQ ID NO: 13118 - DNA, 370 bp, synthetic construct; identical to SEQ ID NO: 1767
  misc_feature 1..370: note = Synthetic construct
  source 1..370: mol_type = other DNA

SEQ ID NO: 13119 - DNA, 379 bp, synthetic construct; identical to SEQ ID NO: 1768
  misc_feature 1..379: note = Synthetic construct
  source 1..379: mol_type = other DNA

SEQ ID NO: 13120 - protein, 11 aa, synthetic construct
  REGION 1..11: note = Synthetic construct
QSLLHNNGYNF

SEQ ID NO: 13121 - protein, 6 aa, synthetic construct
  REGION 1..6: note = Synthetic construct
QYIGSF

SEQ ID NO: 13122 - protein, 6 aa, synthetic construct
  REGION 1..6: note = Synthetic construct
QSIGSY

SEQ ID NO: 13123 - protein, 12 aa, synthetic construct
  REGION 1..12: note = Synthetic construct
QSVLYTPNNKNY

SEQ ID NO: 13124 - protein, 9 aa, synthetic construct
  REGION 1..9: note = Synthetic construct
STYVDAFTY

SEQ ID NO: 13125 - protein, 6 aa, synthetic construct
  REGION 1..6: note = Synthetic construct
YFEVKS

SEQ ID NO: 13126-13131 - skipped (6 entries)

SEQ ID NO: 13132 - DNA, 337 bp, synthetic construct; identical to SEQ ID NO: 1829
  misc_feature 1..337: note = Synthetic construct
  source 1..337: mol_type = other DNA

SEQ ID NO: 13133 - DNA, 319 bp, synthetic construct; identical to SEQ ID NO: 1830
  misc_feature 1..319: note = Synthetic construct
  source 1..319: mol_type = other DNA

SEQ ID NO: 13134 - DNA, 322 bp, synthetic construct; identical to SEQ ID NO: 1831
  misc_feature 1..322: note = Synthetic construct
  source 1..322: mol_type = other DNA

SEQ ID NO: 13135 - DNA, 340 bp, synthetic construct; identical to SEQ ID NO: 1832
  misc_feature 1..340: note = Synthetic construct
  source 1..340: mol_type = other DNA

SEQ ID NO: 13136 - DNA, 331 bp, synthetic construct; identical to SEQ ID NO: 1833
  misc_feature 1..331: note = Synthetic construct
  source 1..331: mol_type = other DNA

SEQ ID NO: 13137 - DNA, 325 bp, synthetic construct; identical to SEQ ID NO: 1834
  misc_feature 1..325: note = Synthetic construct
  source 1..325: mol_type = other DNA

SEQ ID NO: 13138 - protein, 15 aa, synthetic construct
  REGION 1..15: note = Synthetic construct
  SITE 9: note = misc_feature - Xaa can be any naturally occurring amino acid
CAREQRDYXSGFDYW

SEQ ID NO: 13139 - protein, 21 aa, synthetic construct
  REGION 1..21: note = Synthetic construct
CARLRRDGSYHHGAPFYFDNW

SEQ ID NO: 13140 - protein, 16 aa, synthetic construct
  REGION 1..16: note = Synthetic construct
CARGGYQDSAGYADYW

SEQ ID NO: 13141 - protein, 21 aa, synthetic construct
  REGION 1..21: note = Synthetic construct
CARGGRDLVRGLVMTDFFDEW

SEQ ID NO: 13142 - protein, 17 aa, synthetic construct
  REGION 1..17: note = Synthetic construct
CARLRWSSSWYYRFDYW

SEQ ID NO: 13143 - protein, 25 aa, synthetic construct
  REGION 1..25: note = Synthetic construct
CTTAFSMKYCSSTNCPRSDWYFDLW

SEQ ID NO: 13144 - protein, 123 aa, synthetic construct
  REGION 1..123: note = Synthetic construct
EVQLVESGPGLVKPSETLSLTCTVSGGSISYSSYYWGWIRQPPGKGLEWIGSIYYSGSTYSNPSLKSRVTISVDTSKNQFSLKLSSVTAADTAVYYCARLRWSSSWYYRFDYWGQGTLVTVSS

SEQ ID NO: 13145 - protein, 114 aa, synthetic construct
  REGION 1..114: note = Synthetic construct
QLQLQESGPGLVKPSETLSLTCTVSGGSISSSSYYWGWIRQPPGKGLEWIGSIYYSGSTYYNPSLKSRVTISVDTSKNQFSLKLSSVTAADTAVYYCARYFDYWGQGTLVTVSS

SEQ ID NO: 13146 - protein, 121 aa, synthetic construct
  REGION 1..121: note = Synthetic construct
QVQLVQSGGQMKKPGESMRISCRASGYEFIDCTLNWIRLAPGKRPEWMGWLKPRGGAVNYARPLQGRVTMTRDVYSDTAFLELRSLTVDDTAVYFCTRGKNCDYNWDFEHWGRGTPVIVSS

SEQ ID NO: 13147 - protein, 115 aa, synthetic construct
  REGION 1..115: note = Synthetic construct
QVQLVQSGAEVKKPGASVKVSCKASGYTFTGYYMHWVRQAPGQGLEWMGWINPNSGGTNYAQKFQGRVTMTRDTSISTAYMELSRLRSDDTAVYYCARAEYFQHWGQGTLVTVSS

SEQ ID NO: 13148 - protein, 17 aa, synthetic construct
  REGION 1..17: note = Synthetic construct
CARVAPPGVVNNKWFDI

SEQ ID NO: 13149 - protein, 17 aa, synthetic construct
  REGION 1..17: note = Synthetic construct
CARVPPPGVVNNKWLDL

SEQ ID NO: 13150 - protein, 17 aa, synthetic construct
  REGION 1..17: note = Synthetic construct
CARVSPPGVVNKKWFDI

SEQ ID NO: 13151 - protein, 11 aa, synthetic construct
  REGION 1..11: note = Synthetic construct
CCLYAGSYSWV

SEQ ID NO: 13152 - protein, 11 aa, synthetic construct
  REGION 1..11: note = Synthetic construct
CCSYAGSYWAV

SEQ ID NO: 13153 - protein, 21 aa, synthetic construct
  REGION 1..21: note = Synthetic construct
CTRSEKRNTMARKIKGRWFDS

SEQ ID NO: 13154 - protein, 21 aa, synthetic construct
  REGION 1..21: note = Synthetic construct
CARSEKRVTMTRKIKGRWFGP

SEQ ID NO: 13155 - protein, 21 aa, synthetic construct
  REGION 1..21: note = Synthetic construct
CARSEKRITMARKIKGRWFDP

SEQ ID NO: 13156 - DNA, 47 bp, synthetic construct
  source 1..47: mol_type = other DNA
ccttggcacccgagaattccannnnnnnnnnnnncccatataagaaa

What is claimed is:

1. A method of treating a coronavirus infection in a subject in need comprising administering to the subject a therapeutically effective amount of a recombinant antibody, wherein the recombinant antibody comprises a light chain variable region (VL) that comprises a light chain complementarity determining region (CDRL)3 and a heavy chain variable region (VH) that comprises a heavy chain complementarity determining region (CDRH)3, wherein the CDRL3 comprises an amino acid sequence at least 60% identical to CQQSYNVPTF (SEQ ID NO: 1884), and wherein the CDRH3 comprises an amino acid sequence at least 60% identical to
(SEQ ID NO: 1818)
CAKGLTTESRLEFW.

2. The method of claim 1, wherein the coronavirus comprises MERS-CoV, SARS-CoV, or SARS-CoV-2.

3. The method of claim 1, wherein
CDRL1 is SEQ ID NO: 13121,
CDRL2 is SEQ ID NO: 13127,
CDRL3 is SEQ ID NO: 25 or 1884,
CDRH1 is SEQ ID NO: 13103,
CDRH2 is SEQ ID NO: 13109, and
CDRH3 is SEQ ID NO: 1818.

4. The method of claim 1, wherein the subject is co-infected by a pathogen.

5. The method of claim 4, wherein the pathogen is a virus or a bacterium.

6. The method of claim 5, wherein the virus is selected from the group consisting of influenza A, influenza B, HIV, and HCV.

7. The method of claim 5, wherein the bacterium is Escherichia coli.

8. A method of treating an influenza infection in a subject in need comprising administering to the subject a therapeutically effective amount of a recombinant antibody, wherein the recombinant antibody comprises a light chain variable region (VL) that comprises a light chain complementarity determining region (CDRL)3 and a heavy chain variable region (VH) that comprises a heavy chain complementarity determining region (CDRH)3, wherein the CDRL3 comprises an amino acid sequence at least 60% identical to CQQSYNVPTF (SEQ ID NO: 1884), and wherein the CDRH3 comprises an amino acid sequence at least 60% identical to
(SEQ ID NO: 1818)
CAKGLTTESRLEFW.

9. The method of claim 8, wherein
CDRL1 is SEQ ID NO: 13121,
CDRL2 is SEQ ID NO: 13127,
CDRL3 is SEQ ID NO: 25 or 1884,
CDRH1 is SEQ ID NO: 13103,
CDRH2 is SEQ ID NO: 13109, and
CDRH3 is SEQ ID NO: 1818.

10. The method of claim 8, wherein the influenza is influenza A or influenza B.

11. The method of claim 8, wherein the subject is co-infected by a pathogen.

12. The method of claim 11, wherein the pathogen is a virus or a bacterium.

13. The method of claim 12, wherein the virus is selected from the group consisting of MERS-CoV, SARS-CoV, SARS-CoV-2, HIV, and HCV.

14. The method of claim 12, wherein the bacterium is Escherichia coli.

15. A method of treating an Escherichia coli infection in a subject in need comprising administering to the subject a therapeutically effective amount of a recombinant antibody, wherein the recombinant antibody comprises a light chain variable region (VL) that comprises a light chain complementarity determining region (CDRL)3 and a heavy chain variable region (VH) that comprises a heavy chain complementarity determining region (CDRH)3, wherein the CDRL3 comprises an amino acid sequence at least 60% identical to CQQSYNVPTF (SEQ ID NO: 1884), and wherein the CDRH3 comprises an amino acid sequence at least 60% identical to
(SEQ ID NO: 1818)
CAKGLTTESRLEFW.

16. The method of claim 15, wherein
CDRL1 is SEQ ID NO: 13121,
CDRL2 is SEQ ID NO: 13127,
CDRL3 is SEQ ID NO: 25 or 1884,
CDRH1 is SEQ ID NO: 13103,
CDRH2 is SEQ ID NO: 13109, and
CDRH3 is SEQ ID NO: 1818.

17. The method of claim 15, wherein the subject is co-infected by a pathogen.

18. The method of claim 17, wherein the pathogen is a virus or a bacterium.

19. The method of claim 18, wherein the virus is selected from the group consisting of MERS-CoV, SARS-CoV, SARS-CoV-2, influenza A, influenza B, HIV, and HCV.
